(19) United States
(12) Patent Application Publication
(10) Pub. No.: US 2017/0218398 A1
(43) Pub. Date: Aug. 3, 2017

(54) METHOD TO SELECTIVELY TARGET CANCEROUS CELLS FOR GENETIC MANIPULATION

(71) Applicants: Markus Alexander Brown, Bethesda, MD (US); Reinhard Ebner, Gaithersburg, MD (US)

(72) Inventors: Markus Alexander Brown, Bethesda, MD (US); Reinhard Ebner, Gaithersburg, MD (US)

(21) Appl. No.: 15/419,599

(22) Filed: Jan. 30, 2017

Related U.S. Application Data
(60) Provisional application No. 62/289,231, filed on Jan. 30, 2016.

(51) Int. Cl. C12N 15/86; C12N 9/22; C12N 15/90

(52) U.S. Cl. CPC C12N 15/86; C12N 15/907; C12N 9/22; C12N 2840/007

(57) ABSTRACT

Methods and compositions for selectively targeting cancerous cells for genetic manipulation based on cancer specific sequence motifs (CSSMs), which are formed as a result of chromosomal rearrangement, and cells produced by said methods.

### CROSS-REFERENCE TO RELATED APPLICATIONS

[0001] This application claims the benefit of U.S. Provisional Patent Application Ser. No. 62/289,231, filed on Jan. 30, 2016, the entire contents of which are hereby incorporated by reference.

### TECHNICAL FIELD

[0002] This invention relates to methods of selectively targeting cancerous cells for genetic manipulation by cancer specific sequence motifs (CSSMs), and cells produced by said methods.

### BACKGROUND ART

[0003] Cancer is one of the leading causes of morbidity and mortality worldwide, responsible for approximately 8.2 million deaths each year, an estimated 13% of all deaths worldwide¹. In the United States, an estimated 595,690 people will die from cancer in 2016 and the most common cancers are projected to be of the breast, lung and bronchus, prostate, and colon and rectum². The national expenditure for cancer care in the United States reached approximately $125 billion in 2010, and by 2020, is anticipated to approach $156 billion³. Cancer is a severe societal and economic burden and it is of vast importance to develop an effective method to treat cancer to reduce the suffering of the human race.

[0004] Conventional cancer treatment has consisted of chemoradiotherapy and surgery, though we are witnessing the emergence of a new era of precision medicine. Newly evolving approaches such as virotherapy, and molecularly targeted therapies, including small molecule inhibitor-based therapies and immunotherapy are becoming increasingly popular and effective⁴⁻⁶. Advances in virotherapy, immunotherapy and small molecule inhibitor-based therapies are particularly exciting as they do not involve invasive procedures, an advantage over surgery, and can be used in patients not fit for intensive chemotherapy⁷. Unfortunately, progress in molecularly targeted therapies, which depend on high specificity, has been hampered due to tumor heterogeneity⁸. Tumor heterogeneity refers to the distinct genotypes and phenotypes found between tumors in different patients as well as between different cells within the same tumor. These are referred to as inter-tumor heterogeneity and intra-tumor heterogeneity, respectively. This genetic variance is responsible for differential treatment response and represents one of the major hurdles that has yet to be overcome in cancer biology^{9,10}.

[0005] Genome editing is a powerful genetic tool used to manipulate cellular behavior by altering the genes within the genome. Though past use of this technology has primarily focused on cell culture experiments to elucidate gene function, genome editing technologies are being prepared for use in a therapeutic context. Current applications of genome editing involve functional gene knockouts and the repair of mutated genes in monogenic disease. Successful applications of gene therapy in cell culture and mouse models include editing of the IL2RG gene in X-linked Severe Combined Immunodeficiency (SCID-X1), the β-globin gene in Sickle Cell Disease (SCD), regions of the Dystrophin gene in Duchenne Muscular Dystrophy (DMD), and the cystic fibrosis transmembrane conductance receptor (CFTR) gene in cystic fibrosis¹¹⁻¹⁴. Clinical trials will presumably follow once sufficient efficacy for each technique has been proven. One clinical trial has already been performed using ZFN-guided, ex vivo editing of CD4+ T cells to generate CCR5Δ32 mutants resistant to HIV-1 infection, which were reintroduced into patients following genome editing¹⁵. This landmark study demonstrated the feasibility of targeted genome editing for the treatment of disease. The largest challenges faced by genome editing strategies are the efficiency of gene correction and the delivery of the nucleases, and donor DNA when applicable, to the target cell population¹⁶. Genome editing has not been applied to cancer treatment and has remained outside the realm of possibility due to high genetic complexity and the aforementioned challenges.

### SUMMARY

### Technical Problems

[0006] The foremost technical problem with treating cancer is the formidable task of individuating between cancerous and non-cancerous cells. Successful differentiation allows for targeted approaches, which attack the cancer while leaving healthy cells unperturbed. Approaches exist which preferentially target cancerous cells, such as treatment with the small molecule inhibitor, imatinib¹⁷. This drug selectively inhibits a handful of tyrosine kinases, which is particularly effective in treating Philadelphia chromosome-positive chronic myelogenous leukemia (CML) cells, which depend upon the constitutive tyrosine kinase activity of the BCR-ABL1 fusion protein for growth¹⁸. However, the high specificity which allows molecularly targeted therapies to selectively attack cancerous cells, also allows heterogeneous cancer cells to evade these targeted therapies. This introduces the second technical problem.

[0007] Heterogeneous tumor cells can evade specificity-based anti-tumor therapies when the specific characteristic targeted by the therapy is altered in different cancer cells within the tumor. For example, resistance to imatinib can be mediated through mutations in BCR-ABL1 which alter the conformation of the imatinib binding site, or by amplification of the BCR-ABL1 gene¹⁹⁻²². It has been suggested that persistent administration of imatinib may select for the growth of resistant clones in some patients¹⁹. To address tumor heterogeneity, a new characteristic which is shared by the majority of cells which escaped the first round of treatment must be identified and a new approach must be developed and tested to target the remainder of the tumor. However, the identification of new targets, the development of new molecular agents, and validation of these agents, is a lengthy and expensive process.

[0008] In summary, a successful approach for cancer treatment must be highly specific to effectively destroy the cancer at the least cost to the health of the individual, but must also be quickly manipulated to address tumor heterogeneity. The contents of this patent describe one such approach.

### Solution to Technical Problems

[0009] Chromosomal rearrangements are a defining characteristic of cancer cells and occur only in cancerous cells, or in those cells en route to entering a cancerous state. The reshuffling of the genetic material in chromosomal rearrangements such as translocations, inversions, insertions, deletions, and duplications physically relocates sequences of DNA and brings together regions of DNA which were previously separate. The junction sites of these chromosomal rearrangements consist of a region of DNA from a first mammalian chromosome into which a chromosomal region from a second mammalian chromosome has been inserted, thus forming a junction between regions of DNA from different chromosomes. These rearrangements can also occur intra-chromosomally, in which a region from a first mammalian chromosome is inserted into a first mammalian chromosome. The junction site of chromosomal rearrangements consists of a new sequence of DNA. In this way, chromosomal rearrangements create sequence specific motifs. Since chromosomal rearrangements are only found in cancerous cells, the sequence specific motifs created by chromosomal rearrangements are cancer specific. These cancer specific sequence motifs (CSSMs) can be used to specifically target cancerous cells for genetic manipulation.

[0010] The specific genome editing of cancerous cells through CSSMs requires the use of targetable, sequence specific nucleases, such as zinc finger nucleases (ZFNs), transcription activator-like effector nucleases (TALENs), clustered regularly interspaced short palindromic repeats (CRISPR/Cas9), meganucleases, or chemical nucleases delivered in complement with a cancer specific vector, which serves as the donor DNA. The cancer specific vector is comprised of a sequence of interest as well as first and second targeting arms homologous to the chromosomal rearrangement site. The engineered nucleases bind to the CSSM and induce a double-stranded break (DSB). The naturally occurring homology-directed repair (HDR) pathway in the cell will then utilize the homologous first and second targeting arms on the cancer specific vector to repair the DSB. When a sequence of interest, such as a gene, is positioned between the first and second targeting arms, the HDR process will lead to integration of the sequence of interest into, or near, the CSSM site. This yields cancer specific genome editing. The shortening of the first and second targeting arms to a length of approximately 5-25 bp can lead to the microhomology-mediated end-joining (MMEJ) pathway, which can also be used to insert a sequence of interest into, or near, the CSSM site. Alternatively, engineered nucleases can be delivered without the cancer specific vector, leading to the non-homologous end joining (NHEJ) pathway. Repair of the DSB through NHEJ often yields frameshifting indel mutations that can lead to knockout of fusion gene function, with debilitating consequences for the cancerous cell.

[0011] Accordingly, the present invention features nucleic acid constructs, comprised of a sequence of interest, as well as first and second targeting sequences that direct insertion of the sequence of interest into or near the chromosomal rearrangement site (the CSSM); and, optionally, a selectable marker. These sequences can be readily selected and inserted into the nucleic acid constructs using methods well known in the art^{23,24}. The sequence of interest may be operably linked to a regulatory sequence comprising a promoter, when applicable.

[0012] Thus, in one aspect, the invention provides cancer specific vectors comprising: A cancer specificity element, comprising a sequence of interest as well as first and second targeting sequences, wherein each of the first and second targeting sequences are homologous to at least 10 bp (e.g., 25, 50, 75, 100, 200, 500, 750, 1000) of sequence located within a genomic distance of no more than 1 MB (e.g., within 1 MB, 0.5 MB, 0.1 MB, 0.05 MB, 10000 KB, 5000 KB, 1000 KB, 500 KB, 100 KB, 50 KB, 10 KB, 5 KB, or 1 KB) from the chromosomal rearrangement site; and a promoter operably linked to the sequence of interest within the cancer specificity element.

[0013] Homologous is defined herein as any percent of sequence identity sufficient to facilitate homologous recombination. Such amounts include, without limitation, 50%, 60%, 70%, 80%, 85%, 90%, ₉₅%, 100%, and any values in-between or lower.

[0014] Accordingly, the choice of the appropriate percent of sequence identity is within the level of skill in the art. The percent of sequence identity can be determined using the BLASTN program, with default parameters, to obtain homology between nucleotide sequences^{25,26,27}.

[0015] The sequence of interest is a sequence of DNA of variable length that may be at least or about 1, 10, 100, 200, 500, 750, 1000, 2000, 5000, 7500, 10000, 15000, 20000 bp (or any integer value in between). Possible sequences of interest include, but are not limited to, cytotoxic genes such as diphtheria toxin, Pseudomonas exotoxin A, streptolysin O, melittin, or gef which can be specifically integrated into the cancer cells and subsequently expressed, killing the cancerous cells as well as cells in the surrounding tumor tissue through the bystander effect²⁸⁻³². Apoptosis inducing genes such as Caspase-3, Rev-Caspase-3, Rev-Caspase-6, iCaspase-9, and Caspase-14 can also be integrated to kill the cancer cell³³⁻³⁶ . The HSV-TK gene is another potential sequence of interest and can be combined with ganciclovir, or other permissible agents such as penciclovir, to selectively kill cancer cells³⁷. Immune stimulatory genes such as GM CSF, CD-40L, CD-28, or proinflammatory cytokines such as IL-12, can be expressed in cancerous cells, with the intent of causing the cancerous cells to promote an immune-stimulatory program ultimately leading to immune system mediated cancer cell death and, in some instances, the abscopal effect³⁸⁻⁴³. A similar approach involving the use of small RNA molecules such as siRNAs or miRNAs intended to silence genes which promote the tumor microenvironment could consist of RNA molecules targeting mRNA from PD-L1, PD-L2, CD39, CD73, COX2, CSF1, A2A and A2B receptors, HIF1α and SP1⁴⁴⁻⁶⁶. The targeting of these genes is intended to abrogate the tumor microenvironment and/or deregulate the oncogenic effect of the tumor microenvironment on tumor cells. Other potential genes of interest for insertion include functional p53, APC, or dominant-negative β-catenin sequences.

[0016] Additionally, more than one gene can be introduced into the cancerous cells allowing for greater control over the cancerous cell. These aforementioned examples do not discuss all possible implementations and are not intended to limit the scope of the present disclosure.

[0017] The targeting of CSSMs with engineered nucleases and a cancer specific vector can be used to specifically target cancer cells for genetic manipulation. In the event of tumor heterogeneity, a new, patient specific treatment option can be quickly and cheaply developed.

### DESCRIPTION OF DRAWINGS

[0018] The drawings described herein are for illustrative purposes only of selected embodiments and not all possible implementations, and are not intended to limit the scope of the present disclosure.

[0019] TABLE 1. Nucleotide sequences from normally occurring BCR, the BCR/ABL1 fusion gene, and the normally occurring ABL1. In this example, the nucleotide sequence of the BCR/ABL1 fusion gene is the CSSM. One TALEN can be designed to target the BCR gene region of the CSSM and one TALEN can be designed to target the ABL1 gene region of the CSSM. Catalytic active of the Fok1 nuclease domains is dependent upon dimerization of the two domains, which occurs solely in cells with the BCR/ABL1 fusion gene.

[0020] TABLE 2. A list of first and second chromosomal rearrangement sequences which can be targeted by the first and second homologous targeting arms of the cancer specific vector to mediate insertion of the sequence of interest into the cancer cell. Examples of cancer types in which these chromosomal rearrangement sequences are commonly found are given in the right most column.

[0021] TABLE 3. A list of sequences of interest which may be inserted into the cancer specific vector, ultimately intended to be integrated into cancerous cells. The intended effect of the expression of said sequences of interest is given in the right most column.

[0022] FIG. 1. Nucleotide sequences for the BCR/ABL1 fusion gene CSSM with potential TALEN targeting nucleotides underlined. In this example, the left TALEN recognizes a region from the BCR nucleotide sequence, while the right TALEN recognizes a region from the ABL1 nucleotide sequence. The Fok1 nuclease domains of the TALEN pair dimerize, creating a catalytically active nuclease domain, which induces a double-strand break (DSB) at the junction site of the BCR-ABL1 fusion sequence.

[0023] FIG. 2. The Fok1 nuclease domains of the TALEN pair dimerize, creating a catalytically active nuclease domain, which induces a double-strand break (DSB) at the junction site of the BCR-ABL1 fusion sequence. In the absence of donor DNA, the cell undergoes non-homologous end joining (NHEJ) to repair the DSB. NHEJ is error prone and generates indel mutations at the DSB site.

[0024] FIG. 3. The Fok1 nuclease domains of the TALEN pair dimerize, creating a catalytically active nuclease domain, which induces a double-strand break (DSB) at the junction site of the BCR-ABL1 fusion sequence. In the presence of donor DNA with short homologous targeting arms (5-25 bp) the microhomology-mediated end joining (MMEJ) repair process can occur, leading to integration of the sequence of interest (SOI) into the DSB site. This process is error prone and deletions can occur in the sequences flanking the SOI.

[0025] FIG. 4. The Fok1 nuclease domains of the TALEN pair dimerize, creating a catalytically active nuclease domain, which induces a double-strand break (DSB) at the junction site of the BCR-ABL1 fusion sequence. In the presence of donor DNA with short homologous targeting arms (5-25 bp) positioned directly adjacent in the reverse orientation to their position in the genome causes insertion of the entire donor DNA vector into or near the DSB site through MMEJ.

[0026] FIG. 5. The Fok1 nuclease domains of the TALEN pair dimerize, creating a catalytically active nuclease domain, which induces a double-strand break (DSB) at the junction site of the BCR-ABL1 fusion sequence. In the presence of donor DNA with homologous targeting arms, typically 750 bp in length, the cell undergoes homology directed repair (HDR), leading to integration of the sequence of interest (SOI) into or near the DSB site.

[0027] FIG. 6. Two sequences from the genome form a translocation, generating a CSSM. The region from one of the two sequences in the fusion sequence is referred to as the ‘first cancer specific rearrangement sequence’ while the region from the remaining sequence is referred to as the ‘second cancer specific rearrangement sequence.’ Cancer specific rearrangement sequences extend no more than 1 MB from the site of the translocation. Together the cancer specific rearrangement sequences form the CSSM. First and second targeting arms of the cancer specific vector share sufficient homology, or sufficient sequence identity, to the first and second cancer specific rearrangement sequences, respectively, to undergo HDR, or in some instances, MMEJ, with the CSSM.

### DETAILED DESCRIPTION

[0028] Example embodiments will now be described more fully with reference to the accompanying drawings. Example embodiments do not limit the scope of the invention described in the claims.

[0029] Genome editing methods for gene therapy applications have been established for use in an extensive variety of organisms⁶³⁻⁶⁶. These methods involve the use of sequence specific endonucleases to induce a DSB at a target site. The nucleases can be naturally-occurring, such as meganucleases, or engineered to cleave the sequence of interest^{61,62}. Engineered nucleases include zinc finger nucleases (ZFNs), transcription activator-like effector nucleases (TALENs), and the clustered regularly interspaced short palindromic repeats (CRISPR/Cas9) system^{59,63-67}. Genome editing occurs through three primary pathways, non-homologous end joining (NHEJ), homology directed repair (HDR), and microhomology-mediated end-joining (MMEJ), all three of which are initiated by the formation of a double-stranded break (DSB) at a selected site by engineered nucleases. NHEJ is a naturally occurring process which leads to the imperfect repair of the DSB often causing frameshifting indel mutations and is used to knockout gene function. However, NHEJ can be used for imprecise insertion of a DNA vector given that the target site cleaved by the engineered nucleases is present in the donor DNA vector⁶⁸. NHEJ is active during all stages of the cell cycle. HDR is another naturally occurring process within cells in which a DSB is repaired by homologous strand invasion leading to a perfectly repaired sequence. This mechanism can be used to integrate sequences of interest into the genome of the cell. By supplying a donor DNA vector, which may be a circular vector or a linear DNA molecule, containing a sequence of interest to be inserted, homologous targeting arms, and optionally, a reporter gene and, one or more selectable markers, will induce the cell to use the supplied donor DNA to repair the DSB. This leads to homologous strand invasion of the supplied donor DNA into the DSB repair site, guided by the homologous targeting arms, resulting in the use of the donor DNA as the repair template for the DSB. The repair process leads to incorporation of the sequence of interest in the donor DNA into the genome. HDR is active during late S-phase and G2 of the cell cycle. The last repair process, MMEJ, is initiated with the induction of a DSB and relies on short homologous sequences, approximately 5-25 bp in length, to error-prone repair of the DSB⁶⁸. When the short homologous targeting sequences are present in the donor DNA vector, and flank the sequence of interest, MMEJ will lead to integration of the sequence of interest into or near the DSB site. When short homologous targeting sequences are directly adjacent in the donor DNA and in the reverse orientation, as to their orientation in the genome, then the entire donor DNA vector will be inserted into the genome⁶⁸. MMEJ is active during the G₁ and early S phases of the cell cycle.

[0030] Chromosomal rearrangements are a defining characteristic of cancer cells and occur primarily in cancerous cells, or in those cells en route to entering a cancerous state. The reshuffling of the genetic material in chromosomal rearrangements such as translocations, inversions, insertions, deletions, and duplications physically relocates sequences of DNA and brings regions of DNA together which were previously separate. The junction site of these chromosomal rearrangements consists of a new sequence of DNA, generated by the two newly adjoining regions. In this way, chromosomal rearrangements create sequence specific motifs. Since chromosomal rearrangements are only found in diseased cells, the sequence specific motifs created by chromosomal rearrangements are disease specific. The cancer specific sequence motifs (CSSMs) can be used to specifically target cancerous cells for genome editing.

[0031] The selection of specific chromosomal rearrangements to target for genome editing is guided by the reoccurrence frequency of the chromosomal rearrangement. For example, in chronic myelogenous leukemia (CML), the t(9;22)(q34;q11) translocation, which forms the Philadelphia Chromosome, and the BCR-ABL oncogene, is present in approximately 95% of CML cells⁶⁹. The high reoccurrence frequency of this translocation designates it as a reliable, broad spectrum target for genetic manipulation in the majority of CML cells. Other attractive chromosomal rearrangements for targeting include, but are not limited to, the EWS-FLI1 gene fusion found in 90% of Ewing's Sarcoma cells⁷⁰, the PAX3-FKHR gene fusion found in 55% of alveolar rhabdomyosarcoma⁷¹, or the FLT3 internal tandem duplication (ITD), though found only in a quarter of patients⁷², the FLT3 ITD induces a particularly aggressive hematologic malignancy prone to rapid relapse⁷³. The selection of reoccurring chromosomal rearrangements for genetic manipulation not only provides a consistent target for cancer specific genome editing, but also allows for the disruption of a genetic element necessary for the vitality of the cancerous cell. Reciprocal translocations, such as the translocation found on der (9) in CML are very attractive.

[0032] The BCR-ABL fusion gene is one example of a cancer specific sequence motif (CSSM) created by a translocation. The fusion gene is created when the ABL1 gene on chromosome 9q34 is repositioned into the BCL gene on chromosome 22q11⁷⁴. At the nucleotide level, the sequence for the BCL gene is interrupted by the ABL1 gene sequence. In the K562 chronic myelogenous leukemia cell line model, the BCR-ABL translocation on the Philadelphia Chromosome at nucleotide resolution appears as shown in Table 1.

### Table 1.

TABLE 1

| Gene | Sequence |
|---|---|
| BCR | [chemical structure] |
| ABL1 | [chemical structure] |
| BCR/ABL1 (CSSM) | [chemical structure] |

[0034] The sequence of the translocation, in total, is distinct from either of the two original chromosomal sequences, allowing for the individuation between the BCR/ABL1 fusion gene and both the BCR and ABL1 genes. This permits the individuation between cancerous and non-cancerous cells. Programmable target nucleases including ZFNs, TALENs, CRISPR/Cas9, or chemical nucleases can be used to bind to and induce a DSB into the CSSM sequence.

[0035] One possible approach involves the use of TALENs to target the BCR/ABL1 CSSM and begins with the design of a pair of TALENs, with one TALEN recognizing the BCR gene while the other TALEN targets the ABL1 gene, as demonstrated in FIG. 1. The TALEN pair recognizes the BCR-ABL1 CSSM and induces a double-strand break (DSB) near the junction site of the two sequences. For the DSB to occur, the TALEN pair must be in close proximity to allow the Fok1 nuclease domains to dimerize, forming the catalytically active nuclease domain. If the Fok1 domains are unable to dimerize, the domains remain inactive and no DSB is induced. Thus, in normal cells wherein the BCR and ABL1 genes are located on different chromosomes, the TALEN pair is inactive since no dimerization between the Fok1 nuclease domains is possible, also shown in FIG. 1. However, when the BCR and ABL1 genes are translocated and become fused together, the TALEN pair becomes catalytically active, cleaving the fusion gene. This technique is not limited to fused genes, but can be used to target any abnormally fused sequences in the genome.

[0036] Abnormally fused sequences can form as a result of all types of chromosomal rearrangements including, but not limited to, translocations, inversions, insertions, deletions, and duplications.

[0037] In some embodiments, targeting of the CSSM by engineered nucleases is intended to induce non-homologous end joining (NHEJ) causing mutations or insertion of the entire donor DNA vector, as shown in FIG. 2.

[0038] In some embodiments, targeting of the CSSM by engineered nucleases is intended to induce microhomology-mediated end-joining (MMEJ) causing insertion of a fragment of the donor DNA vector or the entirety of the donor DNA vector into or near the site of the DSB, as shown in FIGS. 3 and 4.

[0039] In some embodiments, the DSB is meant to induce homology directed repair (HDR) aimed at the integration of a sequence of interest into the CSSM, as shown in FIG. 5. This approach is further discussed here.

[0040] HDR is a naturally occurring process within cells in which a DSB is repaired by homologous strand invasion leading to a perfectly repaired sequence and can be used to integrate sequences of interest into the genome of the cell by supplying donor DNA with a sequence of interest flanked by targeting arms homologous to the regions flanking the DSB^{75,76}. The donor DNA includes the sequence of interest flanked by two homologous arms, typically 750 bp in length, which consist of a sequence of nucleotides homologous to the DNA strands on either side of the DSB. Induction of the DSB by the TALEN pair followed by HDR integrates the sequence of interest into the genome, as shown in FIG. 5. The first and second targeting arms are selected such that they flank the CSSM. These arms target the rearrangement site, which are not adjacent to each other in normal cells. The targeting sequences are chosen such that they enable the targeting sequences to integrate the gene of interest by homologous recombination into the chromosomal region flanked by the first and second cancer specific rearrangement sequences. Choosing homologous targeting sequences to direct insertion into a region of interest is done routinely⁷⁸.

[0041] Herein, the first and second cancer specific rearrangement sequences refer to the naturally-occurring, nucleotide sequences flanking, and forming, a CSSM. These rearrangement sequences are adjacent due to the translocation and are therefore cancer specific. The use of the terms ‘first’ and ‘second’ denote that the translocation is formed by two sequences, and do not imply sequential order, nor do they imply the chromosome from which the sequence is originally derived. Refer to FIG. 6 for a diagrammatical representation of first and second cancer specific rearrangement sequences.

[0042] Following genome editing, integrated sequences of interest can be expressed, when said expression is driven by a regulatory region. The regulatory region can include a promoter, which may be constitutively active, inducible, tissue-specific, or developmental stage-specific.

[0043] In the event that the CML cell is not targeted, a small biopsy of tissue can be extracted and sequenced. From the sequencing data, a new chromosomal rearrangement can be identified and a nuclease can be engineered, along with a targeting vector, to target the newly identified chromosomal rearrangement. Alternatively, this genome editing strategy can be used in concert with other therapeutic strategies to effectively ablate the tumor.

[0044] In some embodiments, the donor DNA can be supplied simultaneously with the TALEN pair.

[0045] This method, and variations thereof, can be used to selectively target CSSMs generated by chromosomal rearrangements. This offers a novel, bona fide approach for genome editing in a cancer specific fashion.

[0046] Nucleic Acid Constructs—Cancer Specific Vectors

[0047] The cancer specific vector or donor DNA (the terms are used interchangeably herein) is the DNA molecule, which contains the sequence of interest, the homologous targeting sequences (e.g., first and second targeting sequences that direct integration into the CSSM), and a regulatory region comprising a promoter operably linked to the sequence of interest, when applicable. The cancer specific vector can also include a selectable marker, whose expression is driven by the aforementioned regulatory region, or in some instances, by a different regulatory region. The regulatory region can include a promoter, which may be constitutively active, inducible, tissue-specific, or developmental stage-specific. Additional regulatory elements such as enhancers and polyadenylation sequences may also be included.

[0048] Cancer Specific Vectors—Cancer Specificity Element

[0049] The cancer specificity element is comprised of the sequence of interest, operably linked to a promoter when applicable, and the first and second homologous targeting sequences. It is the cancer specificity element, which serves as the template for HDR, and in some instances of MMEJ, and leads to integration of the sequence of interest and the accompanying regulatory region(s).

[0050] Cancer Specific Vectors—Homologous Targeting Sequences

[0051] The nucleic acid vectors described herein include homologous arms or targeting sequences (the terms are used interchangeably herein) that direct sequence specific integration of the donor DNA into the chromosomal rearrangement site through HDR or MMEJ. Targeting sequences may vary in size. In certain embodiments, a targeting sequence may be at least or about 5, 10, 25, 50, 100, 200, 300, 400, 500, 600, 700, 800, 900, 1000, 2000, 3000, 4000, 5000, 6000, 7000, 8000, 9000, 10000 bp in length (or an integer value in between). The targeting elements as described here may be variants of naturally occurring genomic sequences. In certain embodiments, a targeting sequence is homologous to the sequence at the chromosomal rearrangement site that occurs naturally within the cancer cell, referred to herein as chromosomal rearrangement sequences. Every translocation is comprised of two chromosomal rearrangement sequences, as shown in FIG. 6. Preferably, the targeting sequence includes a nucleotide sequence at least 75% identical to its corresponding naturally occurring sequence (the chromosomally rearranged genomic sequence). More preferably, the nucleotide sequence is 90%-100%, or any percentage value in between, identical to the reference sequence, although any percent of sequence identity sufficient to induce homologous recombination or microhomology-mediated repair is viable.

[0052] Cancer Specific Vectors—Homologous Targeting Sequences—Examples

[0053] Homologous targeting sequences can be designed to share sufficient sequence identity with the first and second genes in the fusion, also referred to as first and second chromosomal rearrangement sequences, enabling the cancer cell to be specifically targeted. See Table 2 for a list of potential genes which may be used to target the CSSM of specific cancer types.

TABLE 2

| CSSM | | |
|---|---|---|
| 1^{st} Chr. | 2^{nd} Chr. | |
| Rearrange. Seq. | Rearrange. Seq. | Cancer Type |
| BCR | ABL1 | Chronic Myelogenous Leukemia |
| | | Acute Lymphoblastic Leukemia |
| CBFB | MYH11 | Acute Myeloid Leukemia |
| CRTC1 | MAML2 | Mucoepidermoid Carcinomas |
| DEK | NUP214 | Acute Myeloid Leukemia |
| EML4 | ALK | Non-Small Cell Lung Cancer |
| EWSR1 | ATF1 | Hyalinizing Clear-Cell Carcinoma |
| EWSR1 | ERG | Ewings Sarcoma |
| EWSR1 | ETS | Ewings Sarcoma |
| EWSR1 | FLI1 | Ewings Sarcoma |
| FGFR3 | TACC3 | Head and Neck Squamous Cell |
| | | Carcinoma |
| FLT3 | FLT3 | Acute Myeloid Leukemia |
| FUS | ERG | Acute Myeloid Leukemia |
| FUS | DDIT3 | Myxoid/Round Cell Liposarcoma |
| KIAA1549 | BRAF | Pilocytic Astrocytomas |
| KMT2A | AF4 | ALL, Acute Myeloid Leukemia |
| KMT2A | AF9 | ALL, Acute Myeloid Leukemia |
| KMT2A | ENL | ALL, Acute Myeloid Leukemia |
| MYB | NFIB | Adenoid Cystic Carcinoma |
| | | Dermal Cylindroma |
| NDRG1 | ERG | Prostate |
| NPM1 | ALK | Anaplastic Large Cell Lymphoma |
| | | Acute Myeloid Leukemia |
| PAX3 | FOXO1 | Alveolar Rhabdomyosarcoma |
| PAX7 | FOXO1 | Alveolar Rhabdomyosarcoma |
| PAX8 | PPARG | Thyroid Carcinoma |
| PML | RARA | Acute Promyelocytic Leukemia |
| RUNX1 | RUNX1T1 | Acute Myeloid Leukemia |
| TCF3 | PBX1 | Acute Lymphoblastic Leukemia |
| TMPSSR2 | ERG | Prostate |

[0054] Cancer Specific Vectors—Sequences of Interest

[0055] As mentioned, the sequence of interest can be any nucleic acid sequence, which when transcribed, and in some instances, translated, in the cell alters some aspect of cellular behavior preferably resulting in the death of the cancer cell, or rendering the cancer cell less threatening to the health of the patient. The gene or sequence of interest can be, but is not limited to, nucleic acid sequence coding for a marker protein, a cytotoxin, a suicide gene, a tumor suppressor gene, an shRNA, an miRNA, or a ribozyme. See Table 3 for examples of desired genes.

TABLE 3

| Sequence Name | Sequence Type | Intended Function |
|---|---|---|
| Caspase-3 | Gene/cDNA | Apoptosis |
| Caspase-14 | Gene/cDNA | Apoptosis |
| iCaspase-9 | Gene/cDNA | Apoptosis |
| Rev-Caspase-3 | Gene/cDNA | Apoptosis |
| Rev-Caspase-6 | Gene/cDNA | Apoptosis |
| TP53 | Gene/cDNA | Apoptosis |
| Diphtheria toxin | Gene/cDNA | Cytotoxicity |
| Gef | Gene/cDNA | Cytotoxicity |
| Melittin | Gene/cDNA | Cytotoxicity |
| Pseudomonas exotoxin A | Gene/cDNA | Cytotoxicity |
| Streptolysin O | Gene/cDNA | Cytotoxicity |
| CD-28 | Gene/cDNA | Immune Stimulation |
| CD-40L | Gene/cDNA | Immune Stimulation |
| GM CSF | Gene/cDNA | Immune Stimulation |
| IL-12 | Gene/cDNA | Immune Stimulation |
| Cytosine Deaminase | Gene/cDNA | Induced Cytotoxicity |
| HSV-TK | Gene/cDNA | Induced Cytotoxicity |
| APC | Gene/cDNA | Regulate Wnt signaling |
| Dominant-negative | Gene/cDNA | Regulate Wnt signaling |
| CTNNB1 | | |
| A_{2A} Receptor | miRNA/shRNA | Abrogate |
| | | Microenvironment |
| A_{2B} Receptor | miRNA/shRNA | Abrogate |
| | | Microenvironment |
| CD39 | miRNA/shRNA | Abrogate |
| | | Microenvironment |
| CD73 | miRNA/shRNA | Abrogate |
| | | Microenvironment |
| COX2 | miRNA/shRNA | Abrogate |
| | | Microenvironment |
| CSF1 | miRNA/shRNA | Abrogate |
| | | Microenvironment |
| HIF1α | miRNA/shRNA | Abrogate |
| | | Microenvironment |
| PD-L1 | miRNA/shRNA | Abrogate |
| | | Microenvironment |
| PD-L2 | miRNA/shRNA | Abrogate |
| | | Microenvironment |
| SP1 | miRNA/shRNA | Abrogate |
| | | Microenvironment |

[0056] Cancer Specific Vectors—Optional Selection Markers

[0057] Selection markers may be found within the cancer specific targeting vector for the selection of successfully transfected, or transformed, (the terms are used interchangeably) cells. Drug resistance genes to antibiotics, such as neomycin or G418 are popular selection markers in human cells. Generally, the term “marker” refers to a gene or sequence whose presence, or absence, conveys a detectable phenotype. The two most commonly used types of markers are selection markers and screening markers. Selection markers are genes which, when expressed, convey resistance to a specific set of environmental conditions. Typically, only cells with the vector containing the selection marker will be able to proliferate, thereby selecting the successfully transfected cells. Screening markers convey a readily identifiable phenotype, allowing for the differentiation between transfected and non-transfected cells. In a screen, all cells can proliferate, however only transfected cells display the identifiable phenotype conveyed by the vector and can be chosen based thereof.

[0058] Double-Strand Break (DSB) Inducing Vectors

[0059] The present description includes the use of a DSB-inducing vector, i.e., a nucleic acid construct which includes a sequence that enhances or facilitates HDR or MMEJ by introducing a DSB break at the target site (e.g., encodes a ZFN, TALEN, or CRISPR). These programmable nucleases can recognize and target specific chromosomal sequences to facilitate targeted integration of the sequence of interest into the target site, in this description, the site of the chromosomal rearrangement (CSSM). As is understood in the art, HDR and MMEJ are the processes by which a DSB break is repaired in the genetic material at a specified locus mediated by the use of homologous DNA sequences. Introduction of the ZFN, TALEN, of CRISPR, which mediate the formation of the DSB at the specified site can take several forms. These include introducing the ZFN, TALEN, or CRISPR, as part of a nucleic acid construct, as part of a strand of mRNA, or the protein of the ZFN, TALEN, or CRISPR itself.

[0060] The introduction of the vectors, the cancer specific targeting vector and the DSB- inducing vector, can be performed in a variety of ways. Additionally, the active sequences in the cancer specific targeting vector and the DSB-inducing vector can be introduced to the host cell on the same vector or separately (e.g., on separate vectors or separate types of vectors at the same time or sequentially). These methods are now discussed and are well known in the art.

[0061] Transformations, or transfections, can be performed through a variety of techniques depending upon the particular requirements of each cell type or organism. These techniques have been extensively tested and are readily adaptable to different cells and organisms.

[0062] Liposomal formulations involve the addition of a liposomal reagent in addition to the cancer specific vector and the DSB-inducing vector. Liposomes are vesicular structures formed by a phospholipid membrane with an inner aqueous medium. Vesicular structures self-assemble in aqueous solution due to the hydrophilic and hydrophobic tendencies of the phospholipid molecules. The formation of vesicles by phospholipid molecules entraps water and dissolved solutes, such as DNA, between the lipid bilayers⁷⁹. Liposomal formulations can hold different charges allowing them to interact with DNA, RNA, as well as other substances and can be formulated to target specific cell receptors on the cell membrane⁸⁰⁻⁸². One such example, cationic lipids, form complexes with nucleic acids and fuse with the membrane of the cell^{83,84}. This process increases the efficiency of transformation or transfection. Recent advances include the application of microfluidic mixing used to formulate liposomal particles, which has led to increased encapsulation and transfection efficiency⁸⁵. Lipids and liposomes suitable for use in delivering the present vectors can be obtained from commercial sources.

[0063] Direct microinjection of the nucleic acid vectors into various cells is also contemplated, and has been used effectively in genome editing applications across a variety of species. The nucleic acid is simply injected into the cytoplasm or nucleus of the cell of interest⁸⁶.

[0064] Viral vectors may also be employed in the present invention to mediate delivery of the nucleic acid vectors in vitro, ex vivo, or in vivo. Reovirus, Newcastle Disease virus, Mumps virus, Moloney leukemia virus, measles, vesicular stomatitis virus, Vaccinia virus, adenovirus, adeno-associated virus, rabies virus, pox virus, human foamy virus, lentivirus, and herpes simplex viruses may be attenuated and used. Viral vector genomes have been modified to inhibit replication and normal viral function, enabling them for safe, therapeutic use. Additionally, viral tropism can be used as another method of selection for cancerous cells. Successful viral mediated in vivo genome editing in humans has been demonstrated with an adeno-associated viral (AAV) vector encoding the blood coagulation factor IX (F.IX), introduced to skeletal muscle via an intramuscular injection in haemophilia B patients⁸⁷. Expression of F. IX was detectable at low vector doses⁸⁷. A modified herpes simplex virus (T-VEC) expressing the granulocyte-macrophage colony-stimulating factor (GM-CSF) has been used in a phase III clinical trial to treat patients with unresected stage IIIB-IV metastatic melanoma through intratumoral injection88. T-VEC administration proved to be therapeutically beneficial resulting in significantly increased durable response rate and a longer median overall survival⁸⁸. The viral vectors mediating the delivery of the nucleic acid vectors described herein can be administered intratumorally, intramuscularly, intracerebrally, or intravenously, depending upon the nature of the cancer in the patient.

[0065] In one embodiment, the invention features pharmaceutically acceptable compositions that include the nucleic acid vectors described herein. Various combinations of the vectors described herein can be formulated as pharmaceutical compositions.

[0066] Also within the scope of this invention are RNAs and proteins encoded by the DSB-inducing vector and compositions that include them (e.g. lyophilized preparations or solutions, including pharmaceutically acceptable solutions or other pharmaceutical formulations).

[0067] In another aspect, the invention provides cells produced by a method described herein. The cells can be mammalian cells, such as human cells, monkey cells, rat cells, mouse cells, etc. In some embodiments, the cell is a stem cell. In some embodiments, the stem cell is an induced pluripotent stem cell (iPSC), a neural stem cell, or a hematopoietic stem cell.

[0068] A cancer specific vector comprising sequences shown in SEQ. ID. NOs.: 1, 2, 3, 4, 5, 6, 7, 8, 9, 10, 11, 12, 13, 14, 15.

[0069] Method of Treatment

[0070] The methods of the invention can be used to treat patients who have a cancerous tumor, composed of cells with an identified chromosomal rearrangement. Any of the methods can include the step of identifying a patient in need of treatment; any of the patients can be human; and any of the methods can include the step of identifying the chromosomal rearrangement present in the cells of the tumor, and any of the methods can be performed by administering the present compositions to the patient. For example, the invention features methods of treating a cancer caused by cancerous cells with a chromosomal rearrangement by identifying a patient in need of treatment, identifying the chromosomal rearrangement in the cancer cells; and administering to the patient a nucleic acid construct, vector, and/or DSB-inducing vector as described herein. The amount of the construct or vector administered will be an amount sufficient to improve a condition associated with the disease. As noted above, treatment can also be performed in vivo by administering present compositions to the patient via pharmaceutically acceptable compositions.

[0071] To illustrate a particular application, CSSM targeted genome editing could be used to treat various stages of melanoma. There are two treatment regimes envisioned based on disease state. In a patient with stage I or II melanoma, a biopsy can be taken and sequenced. From the sequencing data, translocations will be identified and their prevalence estimated. A cancer specific vector will be rapidly constructed to target the CSSM of the identified translocation. The cancer specific vector could comprise the herpes simplex thymidine kinase (HSK-TK) gene driven by a constitutively active regulatory element, flanked by first and second homologous targeting arms each of approximately 750 bp in length, each with approximately 95% sequence identity to the first and second chromosomal rearrangement sequences, respectively. A DSB-inducing vector would be rapidly synthesized in parallel, using TALENs targeting the CSSM. TALEN activity would be verified using in vitro translation of the TALENs to cleave a PCR amplified CSSM sequence. The cancer specific vector would be transfected into a melanoma cell line with the addition of ganciclovir to verify potent killing activity. The DSB-inducing vector and the cancer specific vector would be packaged into attenuated vaccinia viruses and delivered through intratumoral injection to the tumor site. The patient would then be treated with ganciclovir or another permissible agent. An identical routine would be performed for a patient with Stage III or IV melanoma, however three cancer specific vectors would be constructed, differing by their gene of interest. The first would contain melittin, the second GM-CSF, and the third would contain an shRNA targeting CD39 mRNA transcripts. The intent of this combination is to impair the tumor microenvironment through CD39 silencing, recruit the immune system with GM-CSF to target local and distant cancer sites, and to kill the local tumor as well as promoting inflammation using melittin. Viruses would be injected intratumorally, though can be injected intravenously as a last resort.

### Advantageous Effects of Invention

[0072] The invention contains several advantages over existing cancer treatment strategies. The foremost advantage is the broad-spectrum applicability of the invention, which allows for the specific targeting of any type of chromosome rearrangement. Existing strategies such as small molecule inhibitor based therapies, such as imatinib, rely upon the activity of a protein product of a fusion gene for targeting. However, not all rearrangements involve the formation and expression of a fusion gene, limiting the applicability of small molecule inhibitors. Since all chromosomal rearrangements generate a CSSM, the proposed method can theoretically target all chromosomal rearrangements and is not dependent upon the formation and expression of a fusion gene.

[0073] A second advantage is the versatility of the invention. Any sequence of interest can be inserted between the targeting sequences, allowing for a variety of options for manipulating the cancer cell. Although killing the cancer cell is an advantageous use of this invention, the specific method of killing, via immune system activation, toxin production, abrogation of the tumor microenvironment, or the reintroduction of apoptotic or tumor suppressor genes can be chosen. Additionally, the cancer cell can be genetically altered in some other way, which does not induce cancer cell death, such as being genetically reprogrammed to another cell type or decreasing the proliferative or metastatic potential of the cancer cell, which is facilitated in some way by the addition, and in some instances subsequent expression, of any desired nucleotide sequence of interest, including noncoding, coding, RNA, and DNA sequences into the cancerous cell.

[0074] A third advantage of the invention is the ability to quickly develop a patient specific therapy. The time required to construct programmable target nucleases to target a new CSSM, a new donor DNA (cancer specific vector), and to verify their activity, is approximately three months. This is significantly less than the amount of time required to test a small molecule or design a new monoclonal antibody for immunotherapy. Additionally, the cost required to produce a new target nuclease and donor DNA (cancer specific vector) is significantly less than costs associated with the production of new antibodies or small molecule inhibitors.

[0075] Unless otherwise defined, all technical and scientific terms used herein have the same meaning as commonly understood by one of ordinary skill in the art to which this invention belongs. Methods and materials described herein for use in the present invention; other suitable methods and materials known in the art can also be used. The materials, methods, and examples presented herein are illustrative only and not intended to be limiting. All publications, patent applications, patents, sequences, database entries, and other references mentioned herein are incorporated by reference in their entirety. In case of conflict, the present specification, including definitions, will control.

### REFERENCES

[0076] 1. International Agency for Research on Cancer. World cancer report, 2014. Lyon, France: World Health Organization, International Agency for Research on Cancer; 2014. http.//publications.iarc.fr/Non-Series-Publications/World-Cancer-Reports/World-Cancer-Report-2014
[0077] 2. Howlader N, Noone A M, Krapcho M, Miller D, Bishop K, Altekruse S F, Kosary C L, Yu M, Ruhl J, Tatalovich Z, Mariotto A, Lewis D R, Chen H S, Feuer E J, Cronin K A (eds). SEER Cancer Statistics Review, 1975-2013, National Cancer Institute. Bethesda, Md., http://seer.cancer.gov/csr/1975_2013/, based on November 2015 SEER data submission, posted to the SEER web site, April 2016.
[0078] 3. Mariotto A B, Yabroff K R, Shao Y, Feuer E J, Brown M L. Projections of the Cost of Cancer Care in the U.S.: 2010-2020. J Natl Cancer Inst. 2011 January
[0079] 4. Russell, Stephen J, Kah-Whye Peng, and John C Bell. “ONCOLYTIC VIROTHERAPY.” Nature biotechnology 30.7 (2012): 658-670. PMC. Web. 28 Dec. 2016.
[0080] 5. Adams J L, Smothers J, Srinivasan R, Hoos A. Big opportunities for small molecules in immuno-oncology. Nat Rev Drug Discov. 2015;14:603-622
[0081] 6. Khalil, D N, Smith, E L, Brentjens, R J and Wolchok, J D (2016). The future of cancer treatment: immunomodulation, CARs and combination immunotherapy. Nat Rev Clin Oncol 13: 273-290.
[0082] 7. Knapper S, Burnett A K, Littlewood T, Kell W J, Agrawal S, Chopra R, Clark R, Levis M J, Small D. A phase 2 trial of the FLT3 inhibitor lestaurtinib (CEP701) as first-line treatment for older patients with acute myeloid leukemia not considered fit for intensive chemotherapy. Blood. 2006;108:3262-70.
[0083] 8. Burrell, R. A., McGranahan, N., Bartek, J., and Swanton, C. (2013a). The causes and consequences of genetic heterogeneity in cancer evolution. Nature 501, 338-345.
[0084] 9. McGranahan N, Swanton C. Biological and therapeutic impact of intratumor heterogeneity in cancer evolution. Cancer Cell 2015;27:15-26.
[0085] 10. Bozic, Ivana et al. “Evolutionary Dynamics of Cancer in Response to Targeted Combination Therapy.” Ed. Carl T Bergstrom. eLife 2 (2013): e00747.
[0086] 11. Genovese, Pietro et al. “Targeted Genome Editing in Human Repopulating Hematopoietic Stem Cells.” Nature 510.7504 (2014): 235-240
[0087] 12. Hoban, Megan D. et al. “Correction of the Sickle Cell Disease Mutation in Human Hematopoietic Stem/progenitor Cells.” Blood 125.17 (2015): 2597-2604
[0088] 13. Mendell J R, Rodino-Klapac L R. CRISPR/Cas9 treatment for Duchenne muscular dystrophy. Cell Res. 2016;26(5):513-514.
[0089] 14. Schwank G, Koo B K, Sasselli V, et al. Functional repair of CFTR by CRISPR/Cas9 in intestinal stem cell organoids of cystic fibrosis patients. Cell Stem Cell 2013;13:653-8. 10.1016/j.stem.2013.11.002
[0090] 15. Tebas, Pablo et al. “Gene Editing of CCR5 in Autologous CD4 T Cells of Persons Infected with HIV.” The New England journal of medicine 370.10 (2014): 901-910.
[0091] 16. Cox D B, Platt R J, Zhang F. Therapeutic genome editing: prospects and challenges. Nat Med. 2015;21:121-131.
[0092] 17. Druker B J, Talpaz M, Resta D J. Efficacy and safety of a specific inhibitor of the BCR-ABL tyrosine kinase in chronic myeloid leukemia. N Engl J Med. 2001;344:1031
[0093] 18. Effects of a selective inhibitor of the Abl tyrosine kinase on the growth of Bcr-Abl positive cells. Druker B J, Tamura S, Buchdunger E, Ohno S, Segal G M, Fanning S, Zimmermann J, Lydon N B. Nat Med. 1996;2:561-566
[0094] 19. Gorre ME, Mohammed M, Ellwood K, Hsu N, Paquette R, Rao P N, et al. Clinical resistance to STI-571 cancer therapy caused by BCR-ABL gene mutation or amplification. Science. 2001;293:876-880.
[0095] 20. Weisberg E, Griffin J D. Mechanism of resistance to the ABL tyrosine kinase inhibitor STI571 in BCR/ABL-transformed hematopoietic cell lines. Blood. 2000;95(11):3498-505
[0096] 21. le Coutre P, Tassi E, Varella-Garcia M, Barni R, Mologni L, Cabrita G, et al. Induction of resistance to the Abelson inhibitor STI571 in human leukemic cells through gene amplification. Blood. 2000;95(5):1758-66
[0097] 22. Mahon F X, Deininger MW, Schultheis B, Chabrol J, Reiffers J, Goldman J M, et al. Selection and characterization of BCR-ABL positive cell lines with differential sensitivity to the tyrosine kinase inhibitor STI571: diverse mechanisms of resistance. Blood. 2000;96(3):1070-9.
[0098] 23. Wu S, Ying G X, Wu Q, Capecchi M R. A protocol for constructing gene targeting vectors: generating knockout mice for the cadherin family and beyond. Nat. Protoc. 2008;3:1056-1076
[0099] 24. Adachi N, Kurosawa A, Koyama H. Highly proficient gene targeting by homologous recombination in the human pre-B cell line Nalm-6. Methods Mol Biol. 2008;435:17-29. doi: 10.1007/978-1-59745-232-8_2.
[0100] 25. Karlin, S, and S F Altschul. “Methods for Assessing the Statistical Significance of Molecular Sequence Features by Using General Scoring Schemes.” Proceedings of the National Academy of Sciences of the United States of America 87.6 (1990): 2264-2268. Print.
[0101] 26. Altschul, S. F., Gish, W., Miller, W., Myers, E. W. & Lipman, D. J. (1990) “Basic local alignment search tool.” J. Mol. Biol. 215:403-410.
[0102] 27. Boratyn G M, Camacho C, Cooper P S, Coulouris G, Fong A, Ma N, Madden T L, Matten W T, McGinnis S D, Merezhuk Y, Raytselis Y, Sayers E W, Tao T, Ye J, & Zaretskaya I. (2013) “BLAST: a more efficient report with usability improvements.” Nucleic Acids Res. 41:W29-W33.
[0103] 28. Ayesh B, Matouk I, Ohana P, Sughayer M A, Birman T, Ayesh S, Schneider T, de Groot N, Hochberg A. Inhibition of tumor growth by DT-A expressed under the control of IGF2 P3 and P4 promoter sequences. Mol Ther. 2003;7:535-541.
[0104] 29. Seth P, Brinkmann U, Schwartz G N, et al. Adenovirus-mediated gene transfer to human breast tumor cells: an approach for cancer gene therapy and bone marrow purging. Cancer Research. 1996; 56(6):1346-1351.
[0105] 30. Yang W S, Park S O, Yoon A R, Yoo J Y, Kim M K, Yun C O, Kim C W. Suicide cancer gene therapy using pore-forming toxin, streptolysin O. Mol Cancer Ther. 2006;5:1610-1619. doi: 10.1158/1535-7163.MCT-05-0515.
[0106] 31. Ling C. Q., Li B., Zhang C., Zhu D. Z., Huang X. Q., Gu W., Li S. X. Inhibitory effect of recombinant adenovirus carrying melittin gene on hepatocellular carcinoma. Ann. Oncol. 2005;16:109-115. doi: 10.1093/annonc/mdi019.
[0107] 32. Prados J, Melguizo C, Ortiz R, Boulaiz H, Carrillo E, Segura A, et al. Regression of established subcutaneous B16-F10 murine melanoma tumors after gef gene therapy associated with the mitochondrial apoptotic pathway. Exp Dermatol. 2010;19:363-71. doi: 10.1111/j.1600-0625.2009.00914.x
[0108] 33.Yamabe K, Shimizu S, Ito T, Yoshioka Y, Nomura M, Narita M, Saito I, Kanegae Y, Matsuda H. Cancer gene therapy using a pro-apoptotic gene, caspase-3. Gene Ther. 1999;6:1952-1959. doi: 10.1038/sj.gt.3301041.
[0109] 34. Srinivasula S. M. et al. . Generation of constitutively active recombinant caspases-3 and -6 by rearrangement of their subunits. J. Biol. Chem. 273, 10107-10111 (1998)
[0110] 35. Song, Wenying et al. “Cancer Gene Therapy with iCaspase-9 Transcriptionally Targeted to Tumor Endothelial Cells.” Cancer gene therapy 15.10 (2008): 667-675. PMC. Web. 21 Jan. 2017.
[0111] 36. Wu, M et al. “Exogenous Expression of Caspase-14 Induces Tumor Suppression in Human Salivary Cancer Cells by Inhibiting Tumor Vascularization.” Anticancer research 29.10 (2009): 3811-3818
[0112] 37. Shaw M M, Gurr W K, Watts P A, Littler E, Field H J. Ganciclovir and penciclovir, but not acyclovir, induce apoptosis in herpes simplex virus thymidine kinase-transformed baby hamster kidney cells. Antivir Chem Chemother. 2001;12(3):175-186.
[0113] 38. Quezada, S. A. CTLA4 blockade and GM-CSF combination immunotherapy alters the intratumor balance of effector and regulatory T cells. J. Clin. Invest. 116, 1935-1945 (2006).
[0114] 39. Brentjens, R. J. et al. Genetically targeted T cells eradicate systemic acute lymphoblastic leukemia xenografts. Clin. Cancer Res. 13, 5426-5435 (2007).
[0115] 40. Davila, M. L. et al. Efficacy and toxicity management of 19-28z CAR T cell therapy in B cell acute lymphoblastic leukemia. Sci. Transl. Med. 6, 224ra25 (2014).
[0116] 41. Pegram, H. J. et al. Tumor-targeted T cells modified tosecrete IL-12 eradicate systemic tumors without need for prior conditioning. Blood 119, 4133-4141 (2012).
[0117] 42. Zhao, Z. et al. Structural design of engineered costimulation determines tumor rejection kinetics and persistence of CAR T cells. Cancer Cell 28, 415-428 (2015).
[0118] 43. Curran, K. J. et al. Enhancing antitumor efficacy of chimeric antigen receptor T cells through constitutive CD4OL expression. Mol. Ther. 23, 769-778 (2015).
[0119] 44. Deaglio, S. et al. Adenosine generation catalyzed by CD39 and CD73 expressed on regulatory T cells mediates immune suppression. J. Exp. Med. 204, 1257-1265 (2007).
[0120] 45. Borsellino, G. et al. Expression of ectonucleotidase CD39 by Foxp3⁺ Treg cells: hydrolysis of extracellular ATP and immune suppression. Blood 110, 1225-1232 (2007).
[0121] 46. Sun, X. et al. CD39/ENTPD1 expression by CD4⁺ Foxp3⁺regulatory T cells promotes hepatic metastatic tumor growth in mice. Gastroenterology 139, 1030-1040 (2010).
[0122] 47. Michaud, M. et al. Subversion of the chemotherapy-induced anticancer immune response by the ecto-ATPase CD39. Oncoimmunology 1, 393-395 (2012).
[0123] 48. Synnestvedt, K. et al. Ecto-5′-nucleotidase (CD73) regulation by hypoxia-inducible factor-1 mediates permeability changes in intestinal epithelia. J. Clin. Invest. 110, 993-1002 (2002).
[0124] 49. Stagg, J. & Smyth, M. J. Extracellular adenosine triphosphate and adenosine in cancer. Oncogene 29, 5346-5358 (2010).
[0125] 50. Clayton, A., Al-Taei, S., Webber, J., Mason, M. D. & Tabi, Z. Cancer exosomes express CD39 and CD73, which suppress T cells through adenosine production. J. Immunol. 187, 676-683 (2011).
[0126] 51. Mandapathil, M. et al. Adenosine and prostaglandin e2 cooperate in the suppression of immune responses mediated by adaptive regulatory T cells. J. Biol. Chem. 285, 27571-27580 (2010).
[0127] 52. Wang, D. & DuBois, R. N. The role of anti-inflammatory drugs in colorectal cancer. Ann. Rev. Med. 64, 131-144 (2013).
[0128] 53. Beavis, P. A. et al. Blockade of A2A receptors potently suppresses the metastasis of CD73⁺ tumors. Proc. Natl Acad. Sci. USA 110, 14711-14716 (2013).
[0129] 54. Cekic, C. et al. Adenosine A 2B receptor blockade slows growth of bladder and breast tumors. J. Immunol. 188, 198-205 (2012).
[0130] 55. DeNardo, D. G. et al. Leukocyte complexity predicts breast cancer survival and functionally regulates response to chemotherapy. Cancer Discov. 1, 54-67 (2011).
[0131] 56. Brahmer, J. R. et al. Safety and activity of anti-PD-L1 antibody in patients with advanced cancer. N. Engl. J. Med. 366, 2455-2465 (2012).
[0132] 57. Silva, George et al. “Meganucleases and Other Tools for Targeted Genome Engineering: Perspectives and Challenges for Gene Therapy.” Current Gene Therapy 11.1 (2011): 11-27.
[0133] 58. Joung, J. Keith, and Jeffry D. Sander. “TALENs: A Widely Applicable Technology for Targeted Genome Editing.” Nature reviews. Molecular cell biology 14.1 (2013): 49-55.
[0134] 59. Sander, Jeffry D., and J. Keith Joung. “CRISPR-Cas Systems for Genome Editing, Regulation and Targeting.” Nature biotechnology 32.4 (2014): 347-355.
[0135] 60. Urnov F D, Rebar E J, Holmes M C, Zhang H S, Gregory P D. Genome editing with engineered zinc finger nucleases. Nat Rev Genet. 2010;11:636-646. doi: 10.1038/nrg2842.
[0136] 61. Silva G H, Belfort M, Wende W, Pingoud A. From monomeric to homodimeric endonucleases and back: Engineering novel specificity of LAGLIDADG enzymes. J Mol Biol. 2006;361(4):744-754.
[0137] 62.Arnould, S, Perez, C, Cabaniols, JP, Smith, J, Gouble, A, Grizot, S et al. (2007). Engineered I-Crel derivatives cleaving sequences from the human XPC gene can induce highly efficient gene correction in mammalian cells. J Mol Biol 371: 49-65
[0138] 63. Foley, Jonathan E. et al. “Rapid Mutation of Endogenous Zebrafish Genes Using Zinc Finger Nucleases Made by Oligomerized Pool ENgineering (OPEN).” Ed. David W. Raible. PLoS ONE 4.2 (2009): e4348.
[0139] 64. Maeder, Morgan L. et al. “Rapid ‘open-Source’ Engineering of Customized Zinc- Finger Nucleases for Highly Efficient Gene Modification.” Molecular cell 31.2 (2008): 294-301.
[0140] 65. Cermak, Tomas et al. “Efficient Design and Assembly of Custom TALEN and Other TAL Effector-Based Constructs for DNA Targeting.” Nucleic Acids Research 39.12 (2011): e82
[0141] 66. Sakuma T. et al. Efficient TALEN construction and evaluation methods for human cell and animal applications. Genes to Cells 18, 315-326 (2013).
[0142] 67. Sanjana, Neville E. et al. “A Transcription Activator-Like Effector (TALE) Toolbox for Genome Engineering.” Nature protocols 7.1 (2012): 171-192.
[0143] 68. Sakuma T, Nakade S, Sakane Y, Suzuki KT, Yamamoto T. MMEJ-assisted gene knock-in using TALENs and CRISPR-Cas9 with the PITCh systems. Nat Protoc. 2016;11:118-133.
[0144] 69. Rowley J. D. (1973). A new consistent chromosomal abnormality in chronic myelogenous leukemia identified by quinacrine fluorescence and Giemsa staining. Nature. 243: 290-293.
[0145] 70. Delattre O, Zucman J, Plougastel B, Desmaze C, Melot T, Peter M, Kovar H, Joubert I, de Jong P, Rouleau G, Aurias A, Thomas G. Nature. 1992;359:162-5.
[0146] 71. Sorensen P. H., Lynch, J. C., Qualman, S. J., Tirabosco, R., Lim, J. F., Maurer, H. M., Bridge, J. A., Crist, W. M., Triche, T. J., and Barr, F. G. 2002. PAX3-FKHR and PAX7-FKHR gene fusions are prognostic indicators in alveolar rhabdomyosarcoma: A report from the children's oncology group. J. Clin. Oncol. 20: 2672-2679.
[0147] 72. Kiyoi H, Towatari M, Yokota S, Hamaguchi M, Ohno R, Saito H, Naoe T. Internal tandem duplication of the FLT3 gene is a novel modality of elongation mutation which causes constitutive activation of the product. Leukemia. 1998;12:1333-1337.
[0148] 73. Gilliland D G, Griffin J D. The roles of FLT3 in hematopoiesis and leukemia. Blood. 2002; 100:1532-1542
[0149] 74. Kurzrock et al. The molecular genetics of Philadelphia chromosome-positive leukemias. New Engl J Med 1988;319:990-8.
[0150] 75. O'Driscoll, M. & Jeggo, P. A. The role of double-strand break repair—insights from human genetics. Nat. Rev. Genet. 7, 45-54 (2006).
[0151] 76. Chen, J. M., Cooper, D. N., Chuzhanova, N., Ferec, C. & Patrinos, G. P. Gene conversion: mechanisms, evolution and human disease. Nat. Rev. Genet. 8,762-775 (2007).
[0152] 77. Chapman J R, Taylor M R G, Boulton S J. Playing the end game: DNA double-strand break repair pathway choice. Molecular Cell. 2012;47: 497-510. doi: 10.1016/j.molce1.2012.07.029.
[0153] 78. Thomas K. R., Folger K. R., Capecchi M. R. High frequency targeting of genes to specific sites in the mammalian genome. Cell. 1986;44:419-428
[0154] 79. Allen T. M. & Cullis P. R. Liposomal drug delivery systems: From concept to clinical applications. Adv. Drug Delivery Rev. 65,36-48 (2013).
[0155] 80. T. D. Heath, J. A. Montgomery, J. R. Piper, D. Papahadjopoulos, Antibody-targeted liposomes: increase in specific toxicity of methotrexate-gamma-aspartate, Proc. Natl Acad. Sci. U.S.A. 80 (1983) 1377-1381.
[0156] 81. R. Fraley, S. Subramani, P. Berg, D. Papahadjopoulos, Introduction of liposomeencapsulated SV40 DNA into cells, J. Biol. Chem. 255 (1980) 10431-10435.
[0157] 82. R. Fraley, R. M. Straubinger, G. Rule, E.I. Springer, D. Papahadjopoulos, Liposomemediateddelivery of deoxyribonucleic acid to cells: enhanced efficiency of deliveryrelated to lipid composition and incubation conditions, Biochemistry 20(1981) 6978-6987.
[0158] 83. R. M. Straubinger, D. Papahadjopoulos, Liposomes as carriers for intracellular delivery of nucleic acids, Methods Enzymol. 101 (1983) 512-527.
[0159] 84. S. C. Semple, A. Akinc, J. Chen, A. P. Sandhu, B. L. Mui, C. K. Cho, D. W. Sah, D. Stebbing, E. J. Crosley, E. Yaworski, I. M. Hafez, J. R. Dorkin, J. Qin, K. Lam, K. G. Rajeev, K. F. Wong, L. B. Jeffs, L. Nechev, M. L. Eisenhardt, M. Jayaraman, M. Kazem, M. A. Maier, M. Srinivasulu, M. J. Weinstein, Q. Chen, R. Alvarez, S. A. Barros, S. De, S. K. Klimuk, T. Borland, V. Kosovrasti, W. L. Cantley, Y. K. Tam, M. Manoharan, M. A. Ciufolini, M. A. Tracy, A. de Fougerolles, I. MacLachlan, P. R. Cullis, T. D. Madden, M. J. Hope, Rational design of cationic lipids for siRNA delivery, Nat. Biotechnol. 28 (2010) 172-176.
[0160] 85. N. Belliveau, J. Huft, P. Lin, S. Chen, A. K. K. Leung, T. J. Weaver, A. W. Wild, J. B. Lee, R. J. Taylor, Y. K. Tam, C. L. Hansen, P. R. Cullis, Microfluidic synthesis of highly potent limit-size lipid nanoparticles for in vivo delivery of siRNA., Mol. Ther. Nucleic Acids in press.
[0161] 86. Horii T., Arai Y., Yamazaki M., Morita S., Kimura M., Itoh M., Abe Y. and Hatada I. (2014). Validation of microinjection methods for generating knockout mice by CRISPR/Cas-mediated genome engineering. Sci. Rep. 4,4513 10.1038/srep04513
[0162] 87. Kay M A, Manno C S, Ragni M V, Larson P J, Couto L B, McClelland A, et al. Evidence for gene transfer and expression of factor IX in haemophilia B patients treated with an AAV vector. Nat Genet. 2000;24:257-61.

[0163] 88.Andtbacka R H, Kaufman H L, Collichio F, et al. Talimogene laherparepvec improves durable response rate in patients with advanced melanoma. J Clin Oncol. 2015; 33(25):2780-2788.

Lengthy table referenced here
US20170218398A1-20170803-T00001
Please refer to the end of the specification for access instructions.

LENGTHY TABLES
The patent application contains a lengthy table section. A copy of the table is available in electronic form from the USPTO web site (http://seqdata.uspto.gov/?pageRequest=docDetail&DocID=US20170218398A1). An electronic copy of the table will also be available from the USPTO upon request and payment of the fee set forth in 37 CFR 1.19(b)(3).

What is claimed is:

1. A cancer specific vector comprising:
a cancer specificity element comprising a sequence of interest as well as first and second targeting sequences,
wherein each of the first and second cancer specific targeting sequences are comprised of nucleotide sequences homologous to at least 10 bp within first and second cancer specific rearrangement sequences, respectively, and
a promoter operably linked to the sequence of interest within the cancer specificity element.

2. A cancer specific vector of claim 1, wherein at least one of the targeting sequences has 100% sequence identity to either the first or second cancer specific rearrangement sequences.

3. A cancer specific vector of claim 1, wherein at least one of the targeting sequences has at least 75% sequence identity to either the first or second cancer specific rearrangement sequences.

4. A cancer specific vector of claim 1, wherein the first and second cancer specific rearrangement sequences extend 1 MB from the chromosomal rearrangement site in either direction.

5. A cancer specific vector of claim 1, wherein the cancer specific targeting sequences are homologous to cancer specific rearrangement sequences comprising a chromosomal rearrangement site between a first mammalian chromosome and a first mammalian chromosome in a human cell.

6. A cancer specific vector of claim 1, wherein the cancer specific targeting sequences are homologous to cancer specific rearrangement sequences comprising a chromosomal rearrangement site between a first mammalian chromosome and a second mammalian chromosome, in which a second mammalian chromosome is different from a first mammalian chromosome, in a human cell.

7. A cancer specific vector of claim 5, wherein the first targeting sequence is homologous to one side of the chromosomal rearrangement site and the second targeting sequence is homologous to the opposing side of the chromosomal rearrangement site.

8. A cancer specific vector of claim 6, wherein the first targeting sequence is homologous to one side of the chromosomal rearrangement site and the second targeting sequence is homologous to the opposing side of the chromosomal rearrangement site.

9. A method of selectively inserting a sequence of interest located within a cancer specificity element of a cancer specificity vector into human cells comprising:
contacting human cells with the cancer specific vector of claim 1 under conditions sufficient for the vector to enter the cells and for the specificity element to integrate through the actions of a DNA repair pathway into a chromosomal rearrangement site (CSSM) in the genomic DNA of the human cells.

10. The method of claim 9, wherein the human cell is a human cancer cell.

11. The method of claim 9, further comprising contacting the cell with a DSB- inducing vector comprising a nucleic acid sequence that facilitates or enhances homologous recombination.

12. The method of claim 11, wherein the DSB-inducing vector comprises a meganuclease, a zinc finger nuclease (ZFN), transcription activator-like effector nuclease (TALEN), or a clustered regularly interspaced short palindromic repeats (CRISPR/Cas9) system.

13. The method of claim 9, wherein the cancer specific rearrangement sequence comprises a chromosomal breakpoint in the first mammalian chromosome in a cancer cell, and one of the targeting sequence shares sufficient sequence identity with a sequence within the cancer specific rearrangement sequence which has been translocated from a location in the first mammalian chromosome to form the breakpoint.

14. The method of claim 9, wherein the cancer specific rearrangement sequence comprises a chromosomal breakpoint in the first mammalian chromosome in a cancer cell, and one of the targeting sequence shares sequence identity with a sequence within the cancer specific rearrangement sequence which has been translocated from a second mammalian chromosome which is different than the first mammalian chromosome to form the breakpoint.

15. A method of inducing a double-strand break in a CSSM in human cells comprising:
contacting human cells with a DSB-inducing vector encoding a meganuclease, a zinc finger nuclease (ZFN), a transcription activator-like effector nuclease (TALEN), or a clustered regularly interspaced short palindromic repeats (CRISPR/Cas9) system, which upon expression, is designed to bind to any of the sequences shown in SEQ ID NOs 1-15.

16. The method of claim 15, wherein the RNA products of the DSB-inducing vector are introduced to human cells.

17. The method of claim 15, wherein the protein products of the DSB-inducing vector are introduced to human cells.

18. The method of claim 15, further comprising contacting human cells with a cancer specific vector, comprising a cancer specificity element, comprised of a sequence of interest, as well as first and second homologous targeting sequences, wherein the first and second targeting sequences are homologous to at least 10 bp of any of the sequences shown in SEQ ID NOs 1-15, under conditions sufficient for the vector to enter the cells and for the cancer specificity element to integrate through the actions of a DNA repair pathway into a chromosomal rearrangement site (CSSM) in the genomic DNA of human cells.

The application's sequence listing, which the Patent Office published only in electronic form, follows.

SEQUENCE LISTING (15 sequences)

SEQ ID NO: 1 - DNA, 137673 bp, Homo sapiens
ggggggagggtggcggctcgatgggggagccgcctccagggggcccccccgccctgtgcccacggcgcggcccctttaagaggcccgcctggctccgtcatccgcgccgcggccacctccccccggccctccccttcctgcggcgcagagtgcgggccgggcgggagtgcggcgagagccggctggctgagcttagcgtccgaggaggcggcggcggcggcggcggcacggcggcggcggggctgtggggcggtgcggaagcgagaggcgaggagcgcgcgggccgtggccagagtctggcggcggcctggcggagcggagagcagcgcccgcgcctcgccgtgcggaggagccccgcacacaatagcggcgcgcgcagcccgcgcccttccccccggcgcgccccgccccgcgcgccgagcgccccgctccgcctcacctgccaccagggagtgggcgggcattgttcgccgccgccgccgccgcgcgggccatgggggccgcccggcgcccggggccgggctggcgaggcgccgcgccgccgctgagacgggccccgcgcgcagcccggcggcgcaggtaaggccggccgcgccatggtggacccggtgggcttcgcggaggcgtggaaggcgcagttcccggactcagagcccccgcgcatggagctgcgctcagtgggcgacatcgagcaggagctggagcgctgcaaggcctccattcggcgcctggagcaggaggtgaaccaggagcgcttccgcatgatctacctgcagacgttgctggccaaggaaaagaagagctatgaccggcagcgatggggcttccggcgcgcggcgcaggcccccgacggcgcctccgagccccgagcgtccgcgtcgcgcccgcagccagcgcccgccgacggagccgacccgccgcccgccgaggagcccgaggcccggcccgacggcgagggttctccgggtaaggccaggcccgggaccgcccgcaggcccggggcagccgcgtcgggggaacgggacgaccggggaccccccgccagcgtggcggcgctcaggtccaacttcgagcggatccgcaagggccatggccagcccggggcggacgccgagaagcccttctacgtgaacgtcgagtttcaccacgagcgcggcctggtgaaggtcaacgacaaagaggtgtcggaccgcatcagctccctgggcagccaggccatgcagatggagcgcaaaaagtcccagcacggcgcgggctcgagcgtgggggatgcatccaggcccccttaccggggacgctcctcggagagcagctgcggcgtcgacggcgactacgaggacgccgagttgaacccccgcttcctgaaggacaacctgatcgacgccaatggcggtagcaggcccccttggccgcccctggagtaccagccctaccagagcatctacgtcgggggcatgatggaaggggagggcaagggcccgctcctgcgcagccagagcacctctgagcaggagaagcgccttacctggccccgcaggtcctactccccccggagttttgaggattgcggaggcggctataccccggactgcagctccaatgagaacctcacctccagcgaggaggacttctcctctggccagtccagccgcgtgtccccaagccccaccacctaccgcatgttccgggacaaaagccgctctccctcgcagaactcgcaacagtccttcgacagcagcagtccccccacgccgcagtgccataagcggcaccggcactgcccggttgtcgtgtccgaggccaccatcgtgggcgtccgcaagaccgggcagatctggcccaacgatggcgagggcgccttccatggagacgcaggtgagttcctcacgccacgtgcgtgggcacacctgcacgggggaggaaaaccatagacgagtaggggatacaaaacagaagttgggagggaggagtggatagttttgagtgtatcaggtgcacttgtggttcacgcggatcctgcacccgaacaaactccatcccctcctccttcctgaatgcatactgttagtgtttggaatggaattgggttgaggatggtcttgtgagggatgggaggtggtttgttcctttggttctagagcaatgtgtttgtgaagtacagcttgtgagttgaaggaagatgcttcaggcagtaacctccttgctatgtgctctctccatgccgggcagtgaggatggcataaaagccggagtcatctctagcgcccacatcggatgctgttagcagggactgatttatgtcttgggcattccccgccaccccactgatcctgttctggaggggttatatgacacgtttgtgaaacctgagatatgctagctgctcctaggccatagaagtgtcaggtttgcttgctaaccagcagtcctgaacacaagtcacagcaggtgagaataggaattagaaggaagtgaggcgacaggcagttgtgactcagtgggccaccgaaaatcaactgcatggagattttatctgggggtgaagcagagccacacccgttctgatctgcctggctttgatgggaggcttcacccatgattattcaccaccaggctcctccatggtggtaacccagccccatttgctgaccctccagtgtgctcctgctgcctcatcttgccaaggataagcacccacaggtgcttatttggggctcccaatctgtggtcagattctagcactaagattaaaactatgggattgtacgcctaacttctgtgctagatgcaaataccatcaggcattttgggtcatgggactatgttttgagatccagacacagtttgccattggggtaaggaaagggtgggctggggtgtgtgtgtgaggctgtcgggaatcttttggagtcctggtccctgttaagctcatctggttttctgcttcattgatttttctttttctgctgatggaggagttgaatgtgcttggtttgtcaaaatcctcttcaaacgagtgaggctatttttggctcttagagctgctgcctttttgtggtgggcactctgtcctgtttgtgttaggtacttccagttactgatcttccatttgcagctggggtttcctgtggtgcacggctccgacctgccgtctggccgggctgcattccctaagtccctatgtgggggcggggtggaaggctgtactattcagaagcctgctttgcaggcacatcagctcgttcggggtctggaggattgccttgtggttactgggcaccagccttgtctggccagctgttggtcaggcgagccagcttgaactggccctcagtgccatggtgcaggagagttattaataaagaagaaaatgagaggtttttagggagatgtgcaaattgaaattgatagtctttgctggtggagaattctgggtttccagaaccttgggcccagcctttcctacagctcctgtagacttggccatgttggccacatcactagacgccgaatgcaagtcagtaaatgaatataggaattattatagagggatggaaagcccagtgccttgagtcagacagggcaggtcctcaggaaatggctgaggaggtaattttaccacttggacccacttttaggacttgctggattcttctccgaatgtcctcaaggtcccacagtctctttcccattaggttttattttttcccccttaaatgttttgtttgttttttgtttttaagagacagcgtctggctctgccatccaggttggaatgcagtagtatgatcatagctcactgcaacctcaaaactcttgggctcaggtgatccaccacagccttttcagcagctgggactgcaggctcaaaccactatactgggctaatttttaattttttttttttgtaaatacagggtcttgctgtgttgcccaggctggtatcaaactcctgggctcaagcattcctctagcttcagcctcctgagtagctggggttacagggatgagacacctcaccaggcctcttagacgtttttagtaactaaggtcacttaaacatttttaaaagggattattttccctcagacagtttttcttttttaagacttaatttttttagagctattaggttcacagcaaaattgatcgggaaatatagcaatttcccacatactccctacccctacacccccacagcctccccagttaacatctcccaccagaggggcatgtttgttacagtccatgaacctacctgcattggtgcctcattattacccaaagtccagagtttacatttgggttcactcttggtgttgtacagtctatgagtttggatcctgttatgttttaaaactcctgcttcttttagccctgggcaccttgacactctgcctagcagtttcccctgacgtgggtccatgtatggcaggcatggaaagaggaatcctcactggctcagccatctgtctctgcctgtttactgatgttctttagagggctgtggagcctgctggtctgaaaaggaacaatgaggaaaatcactcatgggggtgggtggggggaggaagtcaccctaatgctccgcagtggcagatgtggtgacccagatctaataacctcggaatcagtctgtttggatgaatggaccgtcccatttccaagttgagggcccctcaagggagggggctgaagccatccctgggcacggtgacaaagtgcttcccatagggcccctcatgggctcatctgtcgccctggggtggggctgcccatttacaggtaaagacacaactgggaagcggcaaggctgggattctgggtctctgtgtgaatgcagagctgttccgtttggcacgtggtggccctgcggtgttcttcccactaccccacactgctacctgcaaagcacaactggggaggttcagggcgtccttccagtctttgcaccctgggcccgcctgtgggggtaatgatagacggctgtgagccctgctgtaaaactatgcagaacccggccgggcgcggtggctcaagcctgtaatcccagcacttagggagtccaaggcgggtggatcacaagggcaggagatggagaccatcctggctaacacggtgaaaccccgtctctactaaaaatacaaaaaattagccgggtgtggtggccggcgcctgtagtcccagctactcgggaggctgaggcaggagaatggcgtgaactaggggaggcggagcttgcagtgagccgagatcgctgggctgcactccagcctgggcgacagagcgagacacagtctcaaaaaacaaacaaaaaactatgcggaactcacagaaggagagtgtggttctctctgttttttttgttgttgttgtttttttgaggcggagcctcgctctgtcgcccaggctggagtgcagcccagcgatctcggctcactgcaagctccgcctctcggcttcacaccattctcctgcctcagcctcctgggtagctgggaccacaggcgcccaccaccacacccagctaatttttttgtatttttagtagagacggggtttcactgtgttagccagtatggcctcgatcttctgacctcgggttccgcccgcctcagcctccgaaagtgctgggattacaggcgtgagccacccgcgcaaggcggatagtgtggttcttgcgatctgggaacttacaagttaccggaagagagggagaggcacacatgtatgtgctcaagggaagtgagatcagagaagcttccggaaatggcaggactgaagaggacttgatcagtcaccagaagttggagggcagagagtagccgtttgccctaaggaaaaatggcagcaaaggcctggggccacccacgtctgccttgtgattctaggctgtgtgcttttctttaaatggtaaaatatgcttaacttaaaatttaccatttttgtaacttttaaaaagtttggtaaaatgcacataacaaaagttactgtcttaacccttttaaattgtttctttgggtaaggccagtcaagtgaagcaggggaacattttaaccatttttatccatacagttctgtggtgttgactacattcacattgttgtacgaccatcactactgtccatcttgaactttttcatcttcccgactgaagctctgtacccagtgaataataactccccattccctgcccccagcccctggcactgccattctccatctgtgtctctgaattcagctattatagatacctcatgtaagtccagtcctgtggcattcgtctttttgtgattggcttatttcactgagtgtaatgttaccaatgttcatccatgtgatggcagaaattgtgtggattttttttttaatggagtttcactctaggctggagtgcagtggcgtgatctctgcttactgcagcctctgcctccccagttcaagcttcaagagtctcctgcttcaggagttcaggattctcctgcttcagcctcccgagtagctgggattacaggtgtgcaccaccacacccagctaatttttgtattttcagtagagacggggtttcgccatgttggccaggctggtctggaactcctgacctcaagtgatccacccgtcttggcctcccagagtgctgggattataggcatgagccactgctctgggccaactgtgctttttgaaggcaggaataactggttcatttctgggtgtcccagggagcctggttctgagctttacacatagcacatactggaagagcccttcctccttttcatagcccatggggtcaggactggggacttttactgatcattggaaagtgacttatcaattactcggtctttttctcatttcatccctgtagtttactttctgaggatcttttttttttaagtggcttaaaatactttttttttttttttttttcacagttctctggttggctaggcagttttcctgttgtgggcccactgggctgaaataggacggtctagttagcctcacccacacattctgtgattgcaggctgattgacattggggaggaggggctgtcttatttgtgttgcagctggctcgatatcagttgggacagcagacgtttctccttctctttctctctctctctcttttttttttttttaatagagattggatctccctatgttgcccaggctggcctcgaactcctgggcttaagcaatctacccacctcagcctcccaaagtgctggaattacaggcgtgagccaccacacccagcctcctcctttttctttttttcccccattgagacataataattgtacctatttagagggtgtgatattttgatacatatctgcaatgcataatgatcagattgaagtgattagcatattcatcacctcaaacacatttattatttgtttatgctgggaggtctgaggaattcttgattcaaacacccagcccaatgtgcctgtcaactttcttccaggtgtcagttgtgagacgggacagatcttgtgtttcttcatggacttcatgtgagtggctgccctgtgttttcacatttttattaagcagcttaatttgccctttgaattccggtgatgagttggcgccagagtgaccactgcattgtttttcccttgggtgatgggctggactggcaaccagtttgagtgagtaactgtggggcagagaaaggtcacctgggcctggagttggctccatcgtcatctcttaaggccagagcctcgtggccacctctcagttgagtacaggctcctttccatggatggagacagagtgggcagatctgggtggagtctgaggccgctaaaggcatcagcagcacagaagcagagtctagatcaaattttacaagcgttctctggttcaggaaggctgacttgttttgggaacagaatggagcattctgaaacatttcactgaagaaggagctgggagtgctgttgatttgactgggttcaggggagcatgccttatccatgactcccttttgcttagtttgttgcttctagctttatagcctccttccttccttggttggaagtcctgtggctgggagggcttgtgtttgtgactgctaacctcaccaggacaaagagcccaggtgagctatgtgcttgagcacacttgggagaggacacagcagtgcatgaggcccaggctgcagctcacccctgtggtttgagagggtcccctgtttagagtgaatgaatgggcatcttggaagctttctcaggttaccaaagagtaggtctgagttttggctgaggctgctgctttttgggtcaagactcggggtggtggtggattaaattaactatgaaccccagggaatatcttgaccctgactggaatacaactgttgtggctcaagtaggttttttttttccccttttgaaaagtgtagttattttaattaaaatacaatatccatgtaacatgttagaagtttgttatttttattattgtaaaattcatgttatattttttattttttcaagacggggtctcactctgtcacctaggctggagtgcagtggcacgatctaggctcactacaacccccgccacccaggttcaagcgattcttctgccacagcctcccgagtagctgggattacagctaattagcctagctaatttttgtatttttagtagagacagggtttcaccatgttggccaggctggtcttgaactcctgacctcaggtgatctgcccccctcagcctcccaaaatgttgggattacaggcctgagccactgcgcccggctaaaatttatattataagatgcaccattttctccatttttaagtgtacagttcagtggcattaagtacatcaccttgttttgcaaccatcaccacttgtcaatttctagaactttttcatcttcccaaactgaaacttcatatccatcagactttaactccccattccccctcatccccagctcccggaagccaccgttctactctgtctccatgattttgcctctcctagatgcctcgtgtaagtggagtcttataatatttgtcctgtgtctggctgatttcactcaagcagggctttgaagttccccagggcgacactctcagtcttttcttttttttctttctttcttttcttgagacggagtttcgctcttattttgcccaggctggagtgcaatggcacgatctcggctcactgcaacctctccctcccaggttcaagtaattctcctgcctcagccacccaagtagctgggattacaggcgcctgccatcacacccggctaattttttgtatttttagtagagatggggtttcaccatgttggccaggctggtctcaatcgtttgaccccgtgatccacccgcctcggcctcccaaagtgctgggattataggcatgagccaccgctcctagcctagccctctcagtcttaagactgagttaactcccagctctgatccgtcacaagggtgttctcttccggaaaacacccgttagcaatggcgatcttccctgggccttcacgcccttagctttgaagtggcccagagtattagtttgccaaggctgtcccataacaagataccaagactgggtggcttaaataacagaaatatattttctcacacttctggatgccaaaagtccaagatcaaggtgccagcagggttggttccctggagggctctcattggcttgcaggtgccatggtcttgctgcctctgcacatggtctttttctctgtgcatgaactcccctggcatctctctgtgtccaaatttcccttctttttttgtttttgagacggagtttcactcttgtcacccagactggagtgcaatggcacagtctcagctcactgcaacctccacctcccaggttcaggcaattctcccgcctcagccttccgagtagctgggattacaggtgcctgccaacacacctgggtaatttttgtatttttagtagagacggggtttcaccatgttagccagcctggtctcgaacttctgaccttaggtgatccgccctcctcggcctccaaaagtgctgggattataggcatgagccactgcacccggcccaaatttcccttcttaaaaggacaccagtaagactggattaaggtgggcagtaaagacccctgctttaacttaatcagttcttgaaaggccttatttccaaatacagtcacattctgaggtactgggagttagaacgtcaacatatggggagtgaggcatggtttagttcgtaacacttggtgagtccgttactgggcagcagaggaaagggctgccaggcagagggagatggtgtttgtgccggctccctcagacgtgttaggaggagtgtgagccaagcgtcatgtggttttaggcagcctagaggggcctagaggacactgagccaggcatcaggagggctgcgtgctaaaacttcgtgtgctgccatctctctccacatccaaaaagtaggggtgggaacaggtcattgctaaggttctttcgttagcttctttaatttttttctttaaatttaaaatttattacctttttttttaatagataaagggtctcgctctgttgcccaggctggagtatagtggcatgatcatagctcactgtagccacaaactctcgggctcaagcgatcctctctcctcagcctcctgaatacctggtactacaggcgcgtgccaccatgcctggctaatttttaatttttgttgagacagggtcttgctttgttgcccaggctggtctcaaactcctggcctcaaacgatccttcccgcctcggcctcccgaagtgctgggaataattatagatgtgagttactgcacacagcctgaatgtattattaacacaactttttccatctcttttctgtttatcttggtttatgtctcccttattaaaaacgaaggcaaccacctctccctatccaatcgctcaaaggtatttattgagcatctactttgtgcctggcactatcttcatggaaatcctttcttccttattcattgatttatggaaaggctgatctccaagggccttgtctttaaaacaacaacaaacaaacaaaacctttctaatgtcaaagcattttcccctgcgtatctttctttaacggtatatttgcagctgtttcctgttaatcctttgtctatctggcttcctttttagggtgatgggatccttaagcacagagtatgccctgctgtagtgtcctgcaggatgggccacactctggccctttaacagtgtttgatgtgacgatgcacctgagcccatggaggtctgtgtctcgggccccgtgggtgtttgcagattgaagatggaatgatacacaccatctctgagatttttatttgctcagaccttcccctgttctggcccaaccccgcttaatcatgtctaataagtggtggtgggtttttgggggcctagtgatacaggtggcccggcgatgaaacgttggctttggagattatcccgctggttctgtttccttctttgctggtgattggtactccctggctcacccttagagaacttcccgaatcctcagactggggcctgctaattagctgtcttgggttctagctctcactgccacgactttgcaaaatgactatagatgtggatggtggctggtgcccatgggcagagcaatcagcacattcatagacccaccttcctggggctggggtgtgaagaccggacaccccactgaagtagtaaatatgactttcatggaggctgcttcatgggccctcgaaagtttcttgtaaagtggctggagcaggattataattatactccctccactgattgagtctgagggggtatgagacactctggcctggagtaacctgcccaaggtcaagtggttggtggaggggctggcgctgcctctctcctcagactgagtggttgtgttaatcacatgagagcagacacagaatgactttgcggaggtggaggagacctggatcatttgctcagcaaaccggttttgggcacctgctgtgttgggcacagatggtgctcagtacagtcaggcaggccttccagcaggtcggctttggtctggtgggaagacagcctcattaacctaagtgccatgatagaaatcaactgaccccagcctttagtctgggtcttgaaggtgtcagctgtctaggaacatgtttcccctctcattttgcaaatctccaagatagggatttcctgactcttgatagctccttctgggacactttggtaaggcttctccagcaagttgtgtggcaaggggcccaagaagacagaactgttggaagggcgctgcccatccatctgcttttcccaccaacagtcaagggctgtgaatgctgacctgctgctgacagtggtctgttgtgcaggttctgggaggggcagagggacgaggtctggctgggaagatgtagcggagatacacagaggtagccggctgtgtgtgcacagggccaggtgcagggcccagagagccaggtgagtgaccagggagcactgggaaggaaccatctccaggcaaagccaggacacagccaaggggaccccagaagaagagaggggagccttgtgcagcagccacagagagagagagccaggcagagcaaggaattgagcagcccggggagatcctctactcaagtgccactgttggctcaagaagagtttttgaagattcacttcactttaaaggcctgacatgcttccgtgtttaaagtgctgctggggtcagtttgtatgcccgtagagtagggagagattttctgcacatgacgaggtattgatgagcattcgaagcaacctacaggcaacatatgttgacagtgcagactttgaagggaaaagatctggacttgcccagagacctggcacttgccactgtgtggtcttgcacagggacttaattctcccttgacttctgtcagctggagagggtgacccttccccttgggggcttcgtgggagtagcgggtgcagaccatctggcctcctgtctggtctcatagagtctcctgttcatgtatctgatgtcagttgattgaacatcacttagcaaaaaatcttaagaagaaatgcataatttagtatggacatttcactcacttggctcagccattgtataaccagtatgagctccggggggaccctggggtgtgtcagggccctcattctcctcctataatcctcctgggctgagtggagttcttacattttgaaggttatgcaatggactgcatgtttggatccatctgcaaattccccttttggggagaggctgagttgccctgtgcttgagggagctgggcagatggtactttgtgtagcctgctgcattttgcagaatgtcttctctcacaggggtccctgtggaggagtgacaggaaccctcttagctgagtgttgggaggttttaggtggagggctcaggtcacccgcaggggtcatttgactcctaccttatctgggtagataggatcatctttgtcccacagtccttcccagtattgtgaagtgatgcattggcgtgagcccaggggtgccaagggtgggctggcaatgcccacatccagttctctgtccctgaggcacggaggtggttgtgctgggctcagagccgccgtctgactggttggaagccctgctctgattttgtgaatcaccctagttaagtggaagctcagcgtagcctgttccctctgtgggggtgtgcagaagcactgtttatttttgcccacatcttagagtgataaatggaactcatttatgaattttgacttccaaaagctttccactttctcccttaggaacatggataaaaattgtccacatttgtttttggagacatggattgttacctgaaacctacttttcagatggtcttgatgtgaaaactgttgccaggctgggcgtggtggctcatgcttgtaattccagcatcttgggaggctgaggtgggtgggtctccattttttttttctttttttttttctttcttttttctttgagatggggtctcgctctgtcgcccaggctggagtgcagtggagcaatctcggctcactgcaaactccgcctcccaggttcacgccattctcctgcctcagcctcccgagtagctggaactgcaggcgcctgccacaacgcccagctaattttttttgtatttttagtagagacggggtttcaccgtgttagccaggatggtctcgatctcctgacctcgtgatccacccacctcggcctcccaaagtgctgggattacaggcatgagccactgtgcccggccgggtggatctcttattcccaggaatttgagatcagcctgggcaacatagcaagaccccatctctacaaaaaatttaaaagtgagctgggcatggtggcatgtgcccgtaatctcagctcttctgggggctgaggcgataggatggcttgagcccaggaattcagggctggagcaaactatgattgcaccactgcactccatccagcctgggcgacagagcaagcaagaccctatctctaaaaaggaaataaataaatacacataaaaaccattgcttttttttggccgggagtggtggctcatgcctgtaatcccaacactttgggaggccgaggcaggcagaacatctgaggtcaggagttcaagaccagcctggccaacatggtgaaatgtcgtctctaccaaaaatacaaaaatgagctgagcaggctgagagcagtggttcacgcctgtaatcctagcactttgggaggccgaggcaggcggatcacctgaggtcgggagtttgagaccagcctgaccaacatggagaaaccccgtctctactaaaaatacaaaattagctgggcatggtggcacatgcctgtaatcccagctacttgggaggctgaggcgggaaaatcgcttgaactcaggaggcagaggttgcaatcatccaagatcgcgccattgcacttgagcctgggctacaagagcgaaactccgtctcaaaaaaaaaaaaaaaaaaaatatcagctgggcatgttggtgcacgcctgtaatcccagctactcaaggaggctgtggcaggagaattgtttgaacccgagaggcaggggttgcagtgagccaagatcttgccactgcactccagcctgggtgacagagcgagactgtctcaaaaaataaaaaccggccgggcgcggtggctcgcgcctgtaatcccagcactttgggaggccgaggtgggtggatcacctaaggtcaggagttcaagaccagcctggccaacatggtgacactccatctctactaaaaatacaaaaaattaattgggcattgtggcaggcgcctgtaatcccagctactcgggaggctgaggtaggagaatggcttgaacccgggaggcggaggttgcagtgaaccgagatcgtgccattgcactctggcctgggcaacaagagtgaaactctcaaaattaaaaacaaattaaataaataaataaataccactgcttttttaataacaggtacaaattttaaagagaaataaaaaaacattgccatcttcaaatctccacaaaaatggaaagacaggacagtgccagtcagccactttctgcagtcaccatgatcccttctctctccttcatttttaatgtgtgtttttttaaattgtagtaaaatacacatactctaaaatgtaccatctcaaccacttctcagtgtgcagtttagtagtgttaagcctctagtgttttataagtggcagagttgatgggaaaacactgatcttcaggaggggttttttcagtgccagcgtccctctggatgtgtaggcagataagaaggtggctcggacacagtccttaaataagtgccaggagccagcaggccagggtgggagccgggacaagcaggcacctaaagtaacggtaacataaggcaggtggcgagactctgtggatggatcagtgccaggggctgtgcgggaagggaaaccttacatctgtcctgtttcttaggggacgaggttgtggaggggagggtattccaggcagggaatgtgggcaagaactcggaggcttgaagcattcagtatagtcgtctctcgatatccgcaggaaattggttccaggattcccttgggcagcagtccccagcctcctttttgacaccagtgaccagtttcatggaagaaatttttccacagactgggggttaggggatggtttcaggatgggactgttaacagctcagatcatcaggtattagattctcatgaggagcctgcacagcctagatccctcgcatacataagccacaatagggcttctgctcctatgagaatctaatactgctgccggcctgacaggaggtagagcttaggcagtaatggagcaatgaggagcagctgtaaatacagatgaagcgtcactctccgcctaccgctcacctccagctctgcggcccagttcctaacaggccacggactgataccagttcatggcccgggggttggggacccctgcccttggggatcccagaatccttggatgctcaagtccttatgtaaaatgccatagctagcttttgcatataacctatacacatcttcctgtacactttaaatcatcttgagattacttataatacagtcatgcaccacataacgacattttggttattgatggtggtcccataagattataatactgtgtttttactgtaccttttctacatttggtatgtttagaaacagataccactgtgtcacaattgcttacggtattcagtacggtaacatgctgcacaggtttgtagcctaggagcaataggctgtgccacgtagcctaggtgtgtagtaggctctgtcgtgtaggtttgtgtaggtacactctatgatgtttgcatgaagatgacattgcctaatgatgcatttctcaacatatccccttttaagcaaggtatggctttatctaataaaatataaatgctttgtaaatagttgttacagtgtattgttattacatttatattattcttattgttggttatttctttccaaatagtttcattctgaggttgcttgaatctgcagatgtggaacttgaggctgtggagggccaactgtatgctcagaaagtagcaggctctggttggagagttggtataaaatgtggacaacagggaaggtgagggataggagagttggggtcatcctatgtgggtctccgaagccaggctgagggtgttgtgctttctttgaggatgatagggagccactgaaggttgttaagctggagaggggatgcctttggagctttgccttgggaaggtgagtttggcaaaagtgtgtgtgatggtccagtgggagtcaggtacctggagctgttgtcttgaggggcggtggggaggaatggggagggatggagaggacaaggaatatgagctgattctggggagggggtgacagaaagggaggctgtatgagcctggggatggtgagcgctgtgctggcaggtttcagggcctttcggagagaggaccaggccaggaatgaagaggaaggacagaagcgtgggttgcggagggtgtgtggagtggagggccggagcaggcccttgggccttgcgtcctgggggaggtcacgtgagagaaagaagtgggggagtttatgttgcggaaaggctaaaaggaagtgactgttaggaggttatgggataaaggacagaagccaggctccaagtgagtataggagagaccagagcactaaattggaccacagtgtccagcattctggcagcagggaggaggtgggtggggattcaggattagggtccgagtgctccccgagtgtccaccgtcggcctgctctgttccggggcagggccacatctttgtccgtgtgccgaggaggggactggtgggctggagtcccagggggagattattccaagtaggggctccagaaaggtgagtgatgtgtttgggtctatgggaaggttggtgacccccaaagagaggtggctgggttactgctgaacagctatcagggtgatatggctttgcaggggtccagtccatgggcctgacatgttgtagctatgctttgaaggcattttcctggtgggaggccaccgcaggtaaggggagtgaaagggtggctgtggcggctgttccctgtggctggtggccatggataagtgaagaggaacgtgatgctgggcaccatgctggtggtgcctggggcagagcctggccttgtggggctgtggagcagggtgaggatctgggatctaggactgctatgcaccgggccgaatcgtgatacccaagggaggcatcttgtcgtggagcagttgcatgggcccgcccttgttccctggagcagctggtgaggtactgttagaatttggccctaacaggactgggcacagtaggtcacacctgtaatcccagcactttgggaggccgaggctggtgtatcacctgaggtcaggagttcaagaccaggctggccaacatggcgaaacccggtctctattacaaatacacaaaaattagctggacgtgggggtgcacacctgtgatcccagctactcaggaggctgaggctaaagaatcacttgaacctgggaggcagaggttgcagtaagccaagatcacaccattgcacgccagccaaggcgacaagaacgaaactccgtctcaaaaaaaaaaaaaagaatttggccctaacaaatgcaggttgtgattattaacataagtctggtttcctctctcatggcatttctttagtggccagatggtgtgagtggctccagaagactcttctcttctctgtgcaagagccaggaaggctctagaaaggaatgtctgaggaagcatcggagactgggtcccgccatgcctgtgtcatctcctggcttccccggcccttgtgagccccgcggttgcttatttatcctgctaaggccacagtctcaggttccagaaactctggcaaggaagtctgggaaggttgatggggatgggctggcgggctgggagaggtgctttgttttcactcctcaggaagcttgaggcttcttgtggaagcgtctgctgctttgggctgggcagctgcgcccccagaaagccagctaggggtctgccgcctaataccatgggtggaaactattgcagtcagctgttgggatgcaggggaaggtattggtaggactggggtgccctgtctcctttgtccccatgagtgcaggggatagatctgaaaggagaggggaaaatggatgttttcttctttgtctctcctttctccctgctttcaagtctgtgaattaattggagtcattcccaagggaggagggtcactttattgaattttaagacaaggcggggccaggcgcgatggctcacgcctgtaatcccagcactttgggaggccaaggcgggcagatcatgaggtcaagagaccatcctggctaacacagtgaaaccccgtctctactaaaaatacaaaaaaaaaattagccgggcgtggtggcgggcgcctgtagtcccagccactcaggaggctgaggcatgagaatggcatgaactcgggaggcagagcttgcagtgagccaagatccaccactgcactccagcctgggtgacagagcaagactgcgtctcaaaaaaaaaaaaaaagcaagacaaggcatatgacagggcatgatactgacgagaccttggacatcaaaggctggagcaggacttcctcctagggaacatcctcagatatgtagatgtcaccgtgtgggctcagacatccagggtggaccagagccggtggcttaggtctggtggtctgtccctgactgcacttttttcagagctgttttggtttgaagctcaaagcgggctttttatttatttatttagagacagggtcttactccgctgcccaggctggtgcagtggcacactcacaactcactgcagcctcaacctcctgggctcaaacagtcccctcatctcagcatctcaagtagctgggactacaggcatgcaccaccatccccccaggtaatttttaaattttttgtagagacaaggtttcactatgttgcccaggctacaagaggactttaacttttttttaattaaaaaaaaattttttttgaaacaaggtctcactctgtcgcccaggctggagtgcagtggtgcgatcatggctcaccgcagccttgacctctccaggctcaggcgattctcccacctcagccttctgagtagctgggacggcaggcacatgccaccatgcccagctaatttttgtatttttttgtagagatgaggtgtcttcatgttgcccgtgccagtctcaaactcctgggctcaagcgatccacccgccttggcctcccaaagtgctgggactccaggcatgagccaccatgcctggccaagggggcttttcaaaggctgggctgggctgttcatttggaaaaaaggttggggatgttttcacttcaccaggacttctgccagtcagcaggctggtacattaggagcccaagttttgcctggtgctggtggacgggtctaggcctgagaagccgtagtctcctagtgcttggtgctgctaagcccaaagaacagagtggttacaggaaatggaacatttagtctggcagaggccaagggcagcaggtccctactctggctgcccatgtagttaaaaagtcacacacgtgcgcagctggtctgattaatgagtttgttttttgatgtcacagtttctgggcacagcagagctggctcctctgcttggggtctcctcaggctgcagttgaggtgttggccggggctgcattccctgctggggcttggggttctcttctaagctcacctgggttgctggcagtgcttacctcctggcagttgtaggactgagtccccatttccttgctggcattggctggaggccccttctagagcccaccctgttcataggcagttcacacacagctgtttgcttttctcttctcagtgaatctggtttttttgttttttcgtttttgagacggagtcttgctctgttccccaggctggagtgcagtggggcgatcttggctcactgcaagctccgcctcctgggttcatgccattctcctgcctccgcctcctgagtagctgggactacaggcacccaccaccatgcccggctaattttttgtatttttagtagaggtggtttcaccatgttagccaggatggtctcgatctcctgaccttgtgatccgccctcctcggcctcccaaagtgctgggattacaggtgtgagccaccgcgcccggccaagtctgggttttttgaaaagctccctgggtgacttgactctagccctcagggttcagacccttcggtttctgggagtccgtggacattggctgcaggttttgaaaggctggcatctcaagaggggagcagatgaagagtcatggggaaggttcctgtgcagtatgaggaaggtttaattttcttgccaacttttgagataattatgtgtaaatcttttttatatagttaagatgttgctgtgtagttgggtgtccggccttagttaatgtgaacgtttccatgtattagtaaatcttgtgtaaatattatttttaagggccatattattactttgtagtggagttatggtttaatttatctaattttaatgaatttttgttggacatttcgagtggttctttatgcagctggttagtataatgtttcagtgaacttctctctctttttttaaatagcttcactgaggtaattcatgtaccatacaattcaaccctttaaagcagccaatttaatgggttttggtatattacattattactttttaaaaattatggtgaaatatatatacaaatttgacattttaaccactaaaaattaaaattatggtaaaataacataaaatttaccatttttagccgcacagctaaatggtgttaagtatattcctgtcatgcacccatcactatcatccatctccagaactctttccaccttgcaaaactgaaaatctgtactcatttccacccattaaagaacagtgcttcttcccccacgcccagtccctgtaaccaccattctactttctatctctaggaatctgacgactctagaaactttatttaagtggaatcatgcagtatttgtctttttgtgacttatttcacatcatgtcctcaaagttcatctgtgttttactgtgtttcagaaccccttcctttttaagcttgagtaataattcaattgtttgtgtgtgtgtgtgtgtgtgtgtgtgtatatatatatatatttaatctatcattcattgatgggcacttgggtcattttaaccatttttaaatgtacagttcagtggcattaattacattcagtgaatttttttgtggggttttttttttgtttgtttttgaaacaggatctcgctctgccatctcactctgcatctgcactggtgcagtaagagctcactgcagccttgacctcctgtgatcctcccacctcagcctcctgagtagctgggactacagatgcacatcactacactcatctgtcgttttttttctttttgtagagacagggtcttgctgtgttgcccaggctggtcttaaactcctgggctcaaatgatctgcccgccttggcttctcctgaagtgctgggattacaggtgtgagccaccatacttggccaagtgaatacctttttatatgagtttctgcccatgatggggtgggcctctgtcactggatttaccaggtcagagaggtggatggtcttaagacccttgatggctgctgccaggtcaccttccagaaatcctgccccagtttacccttggctttatggttaactgcctgctcttttttgacttttttcttgcctccttctgttcacaggattgtactgaagcagttccatcaggtgctaaaacgtctgagctgtgtggggccttaccctccaaaaatccaaaattgtgatgtgggattttcattccagagaagcagaatctgagattaaggtttgctttgggtcagaggagtctgtgctagactgggctccacggtaattcccgattccttgatgaccctcgaaacagtccagctttgatagggaggagccctgagctggggtcacactggtccactctctcattcaggaagtttcctgaggccactggctgtgtgacactcagttctttgtcagcgctgtggttcttggtagggaaagaacttactgtccccttgtctgttgtgaagtttgctagtttattgctgttgtgggctacttgtaactgaatctgaaaagcattttggcttctcttctgtgcatcgtgagttaggtctgccagatagcattgtccagttaattctggctcatggagttcctgcttggctttcattgaagctccaaggaagcagaaggccatggcagaaaaggatttctacaaagggaaagggacttgcatggctgcacttggctggcagaagctgggctgggacgggaggacaaacacctccctgtgcaggcagtgggttcagatggtcttggctggaaggagggcagataatggtgagaccacgtttggagggagggcagcatggtgtcatgggcttggggaggaaaggagaggaatggccccttcttcagcactgactagtcgtcctgcaccgtggagggtgttccgtcttattttccagcgctcacaactaggagccagcagttcagttttagccatcccagctcatggattatggagctgggacccacgcttgctcctcctcttgctctgcgttgcccatcttagctgtgcccttggccgccactctgactccagtgaatcacgtagactccttgggcctctgaattcctgtccgtaaatgatgaagctgaatggcagcatttttaagatccgttagttttgtgattctaaataaaattaagtcatgttgctctgagttcccagaaaattattttaagatccgttagttttgtgattctaaataaaattaagtcatgttgctctgagttcccagcaaattatttggaaatccctcttggtggatgtcccaaagcagccttcctgtaggatcctggttgtgtctggcttcctgcagtaatgtggattggggtggattggcctctgtgtgcacccttaatgggaaccaggacactgctttgctggctgatttgttgtcctcccttactgcccactggccagtctacaggtcaccaccaggactggaacagatttcagaggccgtgcaggtttcatctggggcaacgtgccaaagtgcagagcgtgggcagcgggaggccctgccgtccgcgtggatgggggagacggcagcatgggggtgtctgccagggcggaggtgatgatgtgcaagcaggtggttggcagcaggaggcctggtagtgccagctggtgtcttgccagccagagcacagccccgcttggtcaggaatgcatgtgctgaggccagcactgagatgagcaggcatgcgtgtgtggccacccctatttctgtgctatagtgggaggagcacattaggtactttgaggccataatttacctttgttacagatgaccaattccccaacagcctcccagccttttgcaggccccacctgggatcagaaggcaaggtatccttcctgcagggaaagcctgttagtctttcctgagcattcttagtgccagttggagtaggggctgtcttggtactgagctggccggtgctggagatgggctggtcagtctggagggcataaggacaggaaggataccggcactgaacgttgtcactcctgtgggggtacagatgcctcagtggaagccacgctttccttcagaatattgcatttggtgggcctgtctcaaggtgcactttgactcctgaagaccctccttctcctcctctcacggatctgccggtgttccctctctggaaggcttgcaggagagacaggatccctccctttactggaactttgcacttgggtttggctttgtgctttgtaaggggatcccattcagcgtccaggatccgagccttgctctatttctgcaaggagctggtggttgctgctcgccaaggggatactcagacagccaaagcctaggcaggatcagaagctcaggcagcagagccaagatttgaaccaataatttttttttttttttttttactttactctacagtattgggattggctgaactttccttaaatgaccagatagtaactaattttatgtttgtggctgagaggcaaaatcgatgctactttgtggatacttacataaccatttggaatgtgagcatgtgaaactataaagagcattcttaaggcctaggtcacatgaaaacaggtggcagtgggctggatttggcctgtgggctgcagtttgccaacctgtgtttcacagcgagctgcctccaaatgcctggtggtgatgcaatcgatgacagagccaggtgtgggcgtctcacatctgtgctcaggagctcacaggagcttctctcctatagaacctgtgaggcaggtagggtagtcttccaaaccccatgaggattctttcctcagagaagttgccggaggaggaaaagctggatgagagatggtcacttggtttctaacttccctttctcttccctgtttcctgctgcttcccagggctgaatgaatattccctgaaacaaggctggccatgagctaataatcgttgaagccaaatgatggggtaatgggcattcatgatgctgtgctcttacttttgtatttgtttgaaattttccaggataaaaagctaagaaaataggctgggggcggtggctcacgcctgtaatcccagcactttgggaggccaaggtgggcggatcacgaggtcaggagatcgggaccatcctggcttacacggtgaaaccatgtctctactaaaaatacaaaaaaaaagtagccgggcgtggtggcgggcacctgtaatcccagctactcgggaggctgaggcaggagaatggcatgaacccaggaggcggagcttgcagtgagccgagattgtgccactgcactccagcctgggcaacatagcgagactccgtctcaaaaaaaaaaaaaaaagttaagaaaatagtcattcattgattaaagttaccaaaaaacccttccacattgagagaacagggtgttaaaactcagaaaccttttcaagccccaagatgagcaaacttgctcctcttatttcctagcagcagatgttcctgagaaaggggtagctgtgcttgagccattccatcattcatccaagccatccatctatccatctattcatcatcaatccaagatccaaacatttatctatttatctatccacccatccatccaaccagtcatacaaccatccatttaactattctttattcatcatccatccaactaaatctattcatccctctgtcatccattcattcctccctccctccctccctccctccctccctccatccatccatccatcatctgtctaacatccagccaaccatccatccattcaacattgaactatccattattcactcatccatccaaacatgcatccattcagtcatcacctattcatccatccattcatcctccaaccattcatctgttcatttgaagttgatgtgacacctactggggtccaagcacaatgcttaggccttgactttgtccttgacctcaaggaacccatagacatatattaaaaacagctgataaaggggtgctgggatggaagtgagtaccaaccaggcactgagaagtgactgactctgctgggttagcagaaggaagacattaaggagaggatggcccattagttggatcttgaatggactcaaaaggagtatattgtaatcccagtactttgggaggctgagttgggagggtcgcttgagcccaggagttcaaaaccagcctaagcaacatagcaagacgctgtctttacaaaaaattaaaaattagccaggtgttttggtgcacacctgtagttccagctactctggaggctgagttgggaggatcgcttgagcccaggagtttgaggctacattgagctgtgattgcaccactgcactctagcctgggcgacagagacagaccctgtctctgaaaaacaaaacaaacaaaaggagtatgttaggccattgtaggggaggaggagaggccttctaagcagggactgtcacaaaggaatgaaagagcctaacagcctggcctgccacaggtttctcagacacttgggatagctggcatatggtgttggggtgagagaccagctagtgatgatgtggggtggtctggtgttgacccccagaggccagagaagacttctgcatggaggatggagtgagcatggagtgtgcgactgccataggccctgctcagtgccctacaccccgtgtgtgcctgtgacacctgatggcctatgcaccccatacacacagctggacagcagaccccggctgccctggctgaggcaggtgtgcccatctgtacccacctttgctttggctcattggctcctggtctcctgttgccgagcacctgtctagacagaatgatgttttgtgtctgtgcaaaacagacacgctggagcttcgtgtttgcagagcttcatgcttcagttggtaccccgtgaggcttgtgtgggcagctgttcagaaacctcaattgggccctctggcatttgtgagaaccttgggctggaacccacccggctggcagtgcaggagagcagcccttccccctcgagggccttgtccctttcacctgtgccgtgtctgtgtgacactgaagctctgtctggtgcgggttgaagtttgtgacccccacttaccaggcccagagcatgcatggtggactgtgggagatagtcattgggatttttcatttgattttatgttttttttttaatcaaggtaaaatacatgtaacatttaccatcttaaccatttaaaaataacacagttcagtggtgttgagtatgttcatgttgttcagccatcaccatctgtcactgaatgtttttgtcttgtacaacaaaaactctggactcagccaggcactgtggctcatgcctataatcccagcactttgggagttcgaggcgggcagaccacctgaagtcaggagttcaagaccagtctggccaacgtggtgaaaccccgtctctactaaaaatacaaaataattagccaggcatggtagcgggcgcctgtaatcccagctcctcaggaggctgaggcaggagaatcgcttgaacccgggaggcggaggttgcagcgaactgagatcggtccactgcactccagcctgggcaacagagcgagactccgtctaaaaacaaaccaaaaaaagcttctggactcattaaatataggctttccatttcccctccccgcggcaaccactgttctactttctgtatggatttggctaatcgaggtacttcatatgagtggattcatatagccttcgtcttttgttcctggcttatttcacgtaacgtcatgtcctcaaggttcatcggtgttgtagcatgcattagaatctcctttcttttagccgggcgcggtggctcacgcctgtaatcccagcactttggtaggccgaagtgtggatcacctgagctcaggagttcaagaccacccaggacaacatcatgagaccccatctctactaaaaatacaaaaaaatgaaccgggtgtggtggcacacgcctctagtctcagctacttgggaggctgaggcaggagaatcgcttgagccccagaggtgaaggttgcagtgagccgagatcacgccactgcactccagcttgggctacagagtgagactctgtctcaaaaaaaaagaatctcttttctttttaaagctgaataatattccattggtagacacacattttgtttatccatctctctgccagtagacacttgggttgcctccaccttttggctgttgtgaataatgttggcaggaacatgggtgtacaaatttcgtggcttgtttgctaatttatttattcatttttattttatttttttgagatggagtctcgctctgttgcccaggctggagtgcagtggcgcgatctcggctcactgcaacctcccctgcctcccgggttcacaccattctgcctcagcctcccaagtagctgggactacaggcacccgccaccacacctggctaattttttgtattttcagtagaaacggggtttcaccgtgttagccaggatggtcttgatctcctgaccttgtgatccgcgcccagcctattttttaatttttttagagatggggtcttgctgtgttgcccaggctggtctcaacctcctggcctcaggccatcctcctgccttagccccctgagtaactgtgattacagacatgcaccactgcgcccctactcaatggtatttttcacatatcagatttttacattatttgcccctcacccacttaacagctatttgtttttcaactaacttcctttactgtttcaacaaatttccaattatagtaatttttaccctagaaaaaagaaattatgggttgaaggtaaaacaaaaatacatatcttgtgaattatctgttctttttcaaacatcttaaagacttaggctgggcacagcagctcacacctgtattaccgggaggctgaggcaggaggattgcttgagcccaggaatttgagagcagcctgggcaacaaagtgagaccccatctctacaaaaaaatttgaaaattagctgggcatggtggcatggacctatagtcctggccgcttgagaaactgaggtgggaagatagcttgagcccgggaggtcgaggttgcggtgagccacaattgtgccactgtactccagcctgggtgacagagtaagaccctgtctcaaaaagaaaaaaaaaaaaaaaattaaaggcttgaaagatgtcatgatgtcatttgatggttgtatatgtgcacgtatgtgcattcaggtgtaatttacagacaatgaaagtcactcttggtatactgttctgtgaggtgtgacagcgttctgtagccattaccttcatcaagatacacagcaggcctatcaccccagaaacttgcattaccccttgttccttgtaggcatttctcctacttgcagcccacgacaccactgatgtgctttctccccttacagtttagcacttttccgaatgtcatataaatagaattgtacagtgtgtaaccttttggctctggcttttttcactttgataatgcatttgaaattcatgcaagttgtgtgtaccaatagggcattcctttttattaccgaggattatttcatcccacagatgggtcagtactgttcttcccctttctatcccactaacatctttattcagatgtaacatacataccatagagttcacccgtttaaaatggaccattcagtggtggttagtattatctcagagttgtgcagtcatcatcactgtctgattgcagatcattttcatcacccccaaaagaaaccctatacctattagcactctctccccatccccttcttctgttagtcctggcaaccaccagtctgctttctgcctctgtggatttgtcttttctgggcttttcataaatgggatcacatggtacatagcttttggtgacagagttcttagagcttctttttttatttgtttgttttttgttgagacggagtcttgctctgtcgcccaggctggagtgcagtggcgcgatctcggctcactgcaagctccgcctcccgggttcacaccattctcctgcctcagcctcccaagtagctgggactacaggcgcccgccactacacccagctaatttttttgtatttttagtaaagacagggtttcactgtgttagccaggatggtctcgatttcctgacctcgtgatccgcctgccttggcctcctaaagtgctgggattacagacgtgaccactgcgcccggcccttttttttgagacagtctcactctgttgcccaggctggagtgcagtggtacaatcttggctcactgcagcctccgcctgccgggttcaaggattctcctgcctcagcctcccgagcagctgggattacaggcgcccaccaccacgcctggctagttttttttgttttgttttgttttgttttttgtatttttaatagagacagggtttcatcatgttgtccaggctggttgtaaactcctaacctcaggtgatccacccgccttggcctcccagagtgctgggattatcttagagcttctcaatagaagtcctatcttccaggccacatctcaccctccaggggtaggggctggtggagctgttctcactcagtttgtcctcagttccttcttgagcctggacccttccctctagatttggggctgctcctctcagagtgccccagaacaaaaccccctccctgttcccacttcccactgtctgcaggactcccctaccccataaccagggtcctgccagccctaccctcagcctcccataagggtctgaagtggcaggtggatgggaaactgcactctctgacctctgcaaggggactgctgctttcccatgagcttctcctctttccgttgctggtttcttctttgttatctttgctgctggagtggccagaccctgggaagcgggctggagagaggagagaagccatcgagccacatggacccctacagcccggaatctgagctgtggtaggattggctgcgattgggattggcagacacactgggtttgtacaggaggggaccctgaaggatgggctgtggtcaaagtgggatcccttcactgtccatagtccttggatctgaaactgctgacaggtgcccctgggaactgctgtggtatttggagtctatagagacacccattgctcaggaccccagggccttaacagggagtacactggcttctgggaagcttgatggagttgttgctgcataggtgcagaaaatcccagcagtggagtaaggcctgaagtaagcccccactgggctctgtggggcctggggcagcctcctctgttgcagggccgccagcatctccagcagaagtgcagtgcttgctctggggacacaggggccttttggaatgagcatgtggacttggcttatggattgtgcctaccccagagcgttgctgtgtctctcaacacacacagcttccatgggctgctcactccaattctgatggagagggcatttatgactctgtccgttggtttgttttctcactgaagaggaacatagatgcacctgctctctgggcaagagatgtggcagctgcaagctgcacaccctgttctgaatattgcccagaccagaatatgaattacttggtcataaatcagtgtcttgtctgcagaaaacttggcaatgtgagggacggcagctttaacttgattcctgggaggctgccggcctcaaaaaggacaaggactggcaatcagatgggcattctctctaatttgggaggctttcgggcttcctcacggagtgctgctcctggggacgtaccacaagaacctcccttgtctagttttgttctgacgcttgggctcattcacctgactgtctccttgcttgtctggctctcaggaaagccttcccggagaggatgtggctgacccctgcagccatctctccacagacaatcatggccctgagcttggctgtccttggttgggtacatccaaggctctgcctgccagggtaggcactggccaggctgtgggatggcagcgttgctgacttgtgctcctgagtcctgggggccctgagtgagcctccgtgcaggagtcgggctgggctgagaggtgtggagagtcgttcccttaatggatggtcaggcacagcagctatgggctcaaattccggagggacgctgagccaggtcccagcctgtgcactgagcatgtcattcactttgagatcccctctagggtaaggcacaccgtgagtggatgtgccactaagaaggaggcagcaggctgagcgtggtggctcacgcctgtaatcccagctctttgggaggccaaggtgggaagattgcttgaagccagaagtttgagaccagcctgggcaagaaagtgagagctcgtctctccaaaaaaacgtaaaaatattaattgctggggcgtggtggtgcatgcctgtagtcctagctactcaggaggctgaggcaggagaatcgcctgaatgacccaggagttcaaggctatagtgagctatgattgcaccactgtacttcagcctgggcaacagagcaagacccctgtctcttaaaaaaaaaaaaaaagaagaagaaggaggaggaagacagtactcccagttatcattgcgagaggcagagatgcgagattccactttgaattatgttgaaatttggggaaaatgcatgcctgataatgggtaaaatacagtaagtttcctcatctgtgaaatagaaatcccactagtcgttgactcaggaacttgctgtgaagattagagatgaggtgtgcaaaaaaaagcacctagcgtggctgctggcatgccctgagtgcttaataacatttgttattctcattttattgttgttatcgtagttgctgttatgacagatagcgggagaggatgttggctgctttatcagctggctggatgtttggtttgtttttttttttttgtgagggttaaagtgggagatgggaagctgtctttttccatcagagttggaaaggcccggagtgttcatttctcagcaataattgttttcaaatggttttattttagggatagatcccttctttgccaatggtatttcagatgaccccccagtatatgaaaaagatgaaagaggagccacaggtcctgaaggctgcccagctcagcctccccacccaacctgggctctgaggacctggcttgggaggtgctgctcttggcagccccagccttccacctctgtggcctgtgccatggccaggaggacctgcatttccttcggactgtctctctgctcaggcggattatttcgtgcttcgtgtgccctcccagggtagggacggggaagctgtgaggatgctctgtggggatcggctccctgtgttgtccatgtcttcttttaggtggagttggctaggcagggaacctggcaccatttccttctcagagcagagaaacagagtcggcgtttgtgagcgtgcattgtccaaacctgcatttggaaggggtcaaagtaggctgggctttgtttttactttttctttttaaattatgatgaactatacataatgtaaaatttaccacttcagccatttttaagcatacgatcgatgcatgacattaactacattgatggtgttgggcaaccatcaccactatccatctccagaactttttcatcttccccagactgaaggtctgtacccatttatagccagtaaacaactctctactccctcctccctcagcccctggccaccaccatcctactctatgtctatgaatttgactactctagagacctcatatgagtggagtcctacagcgtttgtccatttgcatctggtttatttcacttaacataatgtcctcaagtttcatccttgccttggcatgtattagaattttcttcctttttaaggctgaataatattccattatatgtctgcaccgcattttgcttatgcatccattggtggatggacacctggcttgtttctgccttttgtaaagcatgctgctgtgaacacgggtatacatgcttttactcttgaccccttgcaaacaggtctgtcttgcacatgtgccccaggtaccactcagccatctgctcattaatgggagaggggagaaccttcccggttctcttgagtaactaccatgatcacagctttctggaatgtagcaggttacttgataaagagggcgggaattcttagaaaggagggtttctggctgcaagccccatacctgttttctgccaccttctctgccaagggagcttgagccagccatttctgggaagtggtgagcctcagatatggttcagggaagatgggaagtgttacagtgtaattccatctgctgatggggacaggcacaaacctggtggcttgttgtccttggaacagtcagtgatgaaggcagagtggcggtaggacagggaccccgcttagttatgacactgcctcctaagtggaactaagtggaaggtctagtggggccttcttcgtgggttgggacagtggttctgcacccccactcagcagctcaggaactgaagttagagcctgccttcaggggatgggcatgtgtacaagggataggggaccagttaatccaggagttagatggtgactgagactccaggaatttcccctttcctgtaaacatgggtcattttctagaattaccacgttccctttaattttgccatgtttaggaaatctggctgagctggtaattaccaagtctaactgagaaatgtcttatatgtaaccttctgtttcccttgagtgtttcggaggaagctgtgggcacgttttatggataggtgctccgagttctttccgctttggtccagtctgagtggctctgataagcgttggcaacaccaccgatttttgtggggcctggcttcagaacatgaatgtctgtgtttctgcaaaaccaagtgtactcactgcctccttttaaaatcatgctacaaggatgtctttcactttgaattctgcgcttacattgttcaagaggcatcaccatgtttataacctcagacgcagtaattccaccctagggcattttcctaaggaaaattgcttcccccttttcttttatggtagtattatgtgaaattattcattgtattcataacagtggaaagctggaaacaaactgagcatcctgtaatacaaaaggggttccattagcttggtagacgattctgtcatcatccgatggtaaggatgaaaatgaattagcaacgtggaacattgtcataagtggaaaaagtgagatgcccaaagtgtgatgatttgtatcagtcatctcttgttcggtaacaaaccatcccaaagtttagaggcttaaaacaatgcgatttaatcgcagtgccatctggcttggtatgaggtggttctgctgtcacacaggcttggtcatgtgactgtattcagtttgtggtttgactgccgctggcatccgaggtggcctaaccgttgtagctaaggacttggtagggacaccggaaggctgagacctctctctccttgtggtccgtcattgttctgcagtgaagcctgagttgcttctcatggaggctaggttccaagagcaaaggtggatgctgcagggcttcctgaggcctgggctatggaacttctcagctgaacttccaccggattctgttggtacagtgtgtcgcaagtcttgcccagatctaagcgggggtagaaagctggactctacctcttgatgggaggagcagcagtgtcatgtggacacacggcgtggacacaaggcatgattctcaggggctctggtgattgctcccaccacaggattttagttacacagtcacaggacaaggactggaagtgattgtgggaaaatgatcctagaccattggtagaggaggtgaggttgtggatgacttttttagatttttgctgttgccatgttatatagtaggttcaaagtaaaaaatccttagcatgttatccactggactcctagttcaagattgctggggtgtcagatccactgttaggtcccataaacttgcaggctcggccagtgcagaacctctgcagcctggccttcgggaagaagacatccagagatagtgaccacaccatggggtaccttcaagctctggtgctctctcttcgccttgctgaccttgatggagtggataggccttgggttcaacatgaattgacccaggccatgggggcattggttggcctcctctgtaaggtaggcgtggggctcagcctgcaagagctgaccatacttatgtaggattagggggcatcggtgggaaccctggtgtccaaggacagtattgtctggttgactgaagttagggaagtgggtggggaacatggaattgtcaatccttcaggctccttttgaaggtcattgttttcctaaacagatggttatttggactcttacaagttctctgtaagtttgtaaatgtttgaaaataaatagtggaataaataaatacatgggaaaccgcactttgcctacgtgtgggatgctcgtgagacctggagggagggcactcccatgaaggcggggatcccgggtaggcggtgatctgcagctgtggccgcctgctcggacaggaaaggccttgacgtccagatcctgctggtgggagagccgtggcccaggctcctacattgccttggggaggagagtcaggccctgcagggaagggttgtgaacctgctctgggcaaatgggcctggctcctgggaaacttcgggcctgcagtaaccctactctgaccagaggaatccttcccctgtcgcattggcatccctcccctcactgttctcttcattctggacccccttgtcatcacgatgccagtgctgtccctttggtgtggggtttgtgctctgacctgaccctcaggccctgccagtgccctggcttccaggcagatctgggcaggcaggtctgagcccccggagctgggtaagcatctggggcatgtgaggattgcaggaggtgacccgggacagtgcctcacgcccagggtgaccagaaactgtgttcccttccctaacccaccgggtttaaactttttacttgctagccatagagctcttaatcagacaatatccaggggaacccccattatgtaaggcaggtaaagctggtggaagctctcccacccactagttgtccctgctcagccttggcacggggccactgtgggaccggagagctgggaagccaccacctcagtccctgccagtctctggtctgatggtgaggaggggtctggcctgctcagtggcagggtgcggaggtgaggctggtggctgttcttcagctgtgggactcgtgtggggacaagctgaacagtgtgctgatctctgatcaccactcaagccacaagtgactggacaggcatggacctgtgtcctcatagtgaggacccatggggcttcacccaggacagcctggttcgcctgccctccgatgctggtggaggggaggcaaggcagaggggactcctgtaaagggctgtttttttctgtcctggaatgagcacattctgagggtgagtggctgtcagcagttaggaaaaattgcctgttgacttgtttcattaagaggccccttgccgagggtgaggtcgcagcccggccctgctcagggaggaagcggtgtttacagagcggccagctggtgccgggtgaggaggtggctgatccctcgttatggagctgagaaggcctgcgcttccagcccattcctgccatgccgctgccctaatggctgtgacaatggatggatggatggacggagggccaggccaaccaggcagtgaaaacaggaaacctaatcttttaaaaataatccagggggaggggagaaagtgaagcagcaaagcccttaagccgacagatggccctggtggggtgtgtcttccaactgggtaggtgcttctcaaggctgaaaattccagtgagtcggtgaaagctgagcgtgcccaccaaagacacttgaatgggcggctggcattttcaagctctgttccttatgttagacgatgttgttttagcacaaagcctccccccggatcccaagcctctccccaccatggctccagagtcatccctatgtggaacccagcggggcagtctgaccttgtccctttggctgtgaccctgtcccacccttggcctctgtccctggttcttgcccaggtccactattgcatggccagattcatcctcacagggacctgaccgctgttcccttctcacaaacctctgagttgcccatgggctgaaggtcaaggtcacgcatctcaggcaggcaggtgtgcaggaccctccacgctcgtgggcactggcggtgcgggagcacagctccctcctctctgctagctctgagagtcccccgccacccctctgtgtgcttcctgcaccccctctccttgcctagaatgtcccccacaatgtctccacttgcccagctctgtcctctgtgtccagctttgaggctactttctgcagtcaccactattatcccaccccatgtagttctctgtccccgacctgcatgtaacctgtttccctcctccggccgctctcagccgctccttcatgcctccttcctgggctccctttggtacttgtgtgtgcaccgccttctcgcctccaagtctgcagttcctggagcattgagtcatcctgttaccattgcttctgactcgaaggacacggccccttggggctggctggtgtcatgtgtggctgcacagaggggaggggctgttctgccacctgccctttgaggctgtgtgggcacggttccctctagagctccatgtctagcagagcatgcgggggtcctgctgtgcccccactcccatagtgcttgaaccacttcaccccttgcatggggaccaacaggatctacctccctctgtcgaatgtacttctgaaaggaggaaggttacactgaagtttcacctaccgtccatgggattttgaccctgctgtagtgacagctgcatgtttggttctaggggaggaggggtgaatgacttatcttggagaagccagagccaggtgtcagggaatggcctctgtgtctgccacctcctgctgcctctctgcctgggtcatttggttcagtggctataactgtcttggagcagcatttgcttccaggttgggttcaggtatgaagtgctgaaaacatgggaatccctgagcccagccccacccaggcttggtctgctaggggaggtggaagcagggcttctgaggccctgaggctgcctggggagtgcgtttcttctccacccacttgcaagctcagctcacttcctcttactgtatacttggtgtttcattcacactccttgcagcatgcttctgggatatgatgaaaatcagctgtgggtgttgatttcggagctgggcaacgatcctctctggacccgcattcccatctgtaagatgggggtagtaacctccaccctcactgcttcctggaattgttgatgcatcagagagagcagccagtttgcactgtgggcttccagggagatttatttcatgccatggttccccttttggataaggggctagatttgctttcttcatcagattgtccccggggacacacacaggagttgctctcacgtcgttgcctcttggtatctttgaagcctgtctgttagaacccgcctctttgatggtagggcaggatttggagaggtgatggcctctttgggttgaatttctcactctaatgggctcacagtaccttctgattacctcctggttcagcttccttgacaacaaactagaattgcttcagatgcaatacttcattcttcctagtgcatgagtaattcatatccactatttgctccctcttttacaaattggaggatggcgatgcagatggaagatgacctgctcatgcatcaggccgagacttcaggcttccgaggcacatgtttgaggttgagactccctagggagagtggagtcacctttgctttgcagaggagccatgggggaccatgtctcagcacctctgaaaggttttctgccccatccagtctgctgcttctctcccctccctccttcaccctgttccccttcatcaggggtgtaaatgatggtcttcctgtcttcccatgcacctcccttaggaccagagcaggtgggagatgtcttcacaggagggttccaggatgataggtttggagcaaagggctgggggcttctggggagccccattcctgcacctccatgctgaatgaagaggccacacgaggatgctcacactgctcagtgcttcttagagaaagctgctggctctgattaggtctggtagggggcagggtccttatttctcaggactcaagacagatcctcaatcaatggcaagagtcatttttgttttcccgccaggctcactagagtttctgtctcttcccacttttctttgtgggacagctttcgggagggtggggttgtctttgttatgagaagtgacagccagatggactcagtggctcacacctgtaatcccagcactttgcggggccgaggcaggcagaatctgaggtcaggagttcgagaccagcctggctaacatgttgaaaccctgtttttactgaaaagacaaaaaattagctgggcgtggtggcaggcgcctgtaattccagctacttgggaggctgaggcaggagaatcacttgaacccaggaggcggaggttgcagtgagctgagatcatgccactgcactccagcttgggcaacagagtgagactctgtctcaaaaaacaaaaaaaagagagagaagtgatagccctccccgtcttctcacctgtcactcctcttggtctccctgtggagcaagtttcctgcagtcactatgtgctttgttcacttctacatccacagtgcctaaaacaatgccagcacgtagtaggtgctcagttaatgcttgcagagtgaacaggtgacacacctgcctggcgcgtcttgggccccttattaggcacagtaaggcatagaaaactgtctgattccggccgagtttccaggctaagtgggaaggtggaacacagcatatgaagattaaaatgagaagtaaagtgatagttcacagtatgttggtgggaaaaggttgatacgattgtcagataaattgcacaagtgctaagtgctgagaaagttcagagcaggggaagtggttcccgaggaaggaggcagaggagtgtagattttgtagagaaggctaagagagggtgggatgtggcaaagggcgaagggtagaaggagacatgacctgggagaggggagcgtggcaggggcccatgggcttcagggctgtgaccaacagcatgctggtgaacagaccagacgtgggctatgttgtctgggcctgtgaagctgagttcaagagcccaagccttcctccctcatgcccatgctgttggaaccttgaggtggttacctgggcagaattcctgtcctggtctctgggcagcatctctcctgcttctgataaagactaacaaggtgtcttagtctgttcaggctgccataacaaaatgccaggctgggctgtttataaacaagagagatttagtgcgcacagttctggatttggggaagtttgagatcaaggcacctacagattacatgttagataagggctccctgcttcatagatggcatcttcctgctgtttttcatgtggcagaagggccaaagaagctctcttgggcttcttattgtaaaggcattaatttcattcatgagggttccacccttacgacctcatcacctcccagcagccccacctcttagtattatcacattgggggttagactttaacataagagctttggtggggggtacagtattaagtccatagcacaaggggtgacaccttggagtgggtggagggtgaccacctagcagtgtgacaagaactccactaagggaattggggtgtgagtgtgagcatgtgtgagtatttgtatgtgcacacttgtgtgtgtacatgcatatctccaagtgtccatgtatggctgtgtgagtgcatgtgcctgtgtgtggcccattgggggacaggagcaggggccttgaggctgggctttgggctttgtgtacatttcttagcatcttgtagatgcggatgctgactccctcctatggtgcctctcaagatgaaatgagagcatatccaaagccctgtgtgcacagtcgctcccttcttccctcttctcctggtatcagcccccctattctggctggctgagccctaggctgccggtgcagggggtactcagggaggagggctcaggcaggcagcagaggcctggagggcctggctctgtgggatctgtgaccttctccactccagttggcaagggtccaggtgagtctcccaccctcccagtgcacagcgagatttcaggttttgtttctagaccctgattgccatgtggttttcacaccgcctctcctcctgccattgacagtggggggctttgattgctgtcccccctgtaatgggaacactttgctgaccttttccttcctttccccgctaaatgattcctggccaaagccctgcctccccatggggagccgcctcttcctgcctttcccaaaggcacaggccctgatgcccaggaccccgtgtaggacacacagggacagacaggagtgcccttatctcacccgctggtttggagggacagtttatctctcttttccacatggtctaaaggaagctggtgctgaaatggcagagacagggactgactccacaacaggaagacaggctcgggcgcagatctctcgactgtggccgccacacagtggtcactgctgttgtcctgggccacctctctgatccccagggctctcctgtcccaagtggctgcctgaattggttttttgcactggcatttatacctttacttggttaatgattcttagagttctttatggactgtagggggaggaccgaggtccaggtggtggtgatggctgctttctaactggcagtcctgggcagtgccttgaggggaggcatttcttctaaagctcagctctcacttgtgcctccaggagagtcaaactgccgccttgctctgagccatctcaaagtgaggtgagccacattctctcagcagggtggtgggttggcagatgacttgaaggaagagcccactccctgcttacccactctcgttttaatacgccaagtctgcccagagacgctggcctcctcaaaggaggaaagacaccctccaaaacctgctgagaggccgggggctgtagctcacgcctgtaatcccaacactttgggaggccaaggtgggcggatcacttgaggtcaggagttccagaccagcctggcccacacagtgaaaccctgtctctactaagaatacaaaaatcagccaggcatggtggcacacgcctgtgatcccagctacttgggaggctgagtcaggataatcgcttgaacccagaaggtagaggttgcagtaagccgagatcacgccactgcactccatcctgggcgacagagcaagactccatcccccccaaaaaaacaaaacctggacagagtggccccctgcaggccccccgcttcttggggctggagcaagtgttcttatagatgtctctggtcgtcttggccactggctcggagacagccaccgagacccggcatttggagcagctggctgggatgctgcagggaggggtgtccaagcaggaggcagccaagcctgcctggagcaggataagatgagctcccctctgagactcagtattttctgttcaatgaaaggaacagtccagtatttgagacaggagaaccggaattgacttgactggtctgtggtgctttttttttttttttcctgtgccttgattcttccatttaaatacagaggacacctgaccctaaggcgcatggaccagagacatcatctgaacccagagtagcgtgcatggtgattattttgagatttcctctctgtccccatctgggctcattttcactggatggaccccaccatgcttcttagaccctgcggcaggctggccagcccaggtggagggcatgcgctttgccaaaggcgagaccgctggctggagactggactgcggggccatcctccaggctcttgcacggggacctggaggatgtggcccaagctcagtctccttcagtctgcattggtggctaatcaggacacgggtatgggggaaatccctgtaggtctggaggtggctgggatggcccagggcttgtttctcaccctttacctctagtttatatcccactgacaccgaggtttattcgcaatgcacttcagcagatagggtgatggggtagaatcacagagctgaggagtccacggtaaagaattccaggtccctgtgcttctcctgcatcccagctcttctgtcattggaaggcagtcatccaagactcctcccttttctggcctttgctgtcagggagcctgggggccagttcactattcatttcgcacagtcagtgcatcccagggcctgaaacacgctttgagccttcatttttgttttcttcccagtggccttatttttacactgtttgatttcttaaggctgctttggatccttttaaaagtaggcgagtgaaaagctacacaaacaaactcctgggcttggcaccctcctgtgcccacatccggcgccctttctttgggacctgccggagcctgggtcccctggcagggtggggcaggatagggtggggtgttgcctgagaaatggtgcaaaccttcttgcactccgtaaatgattcatttccttcaaatgtcctatgctgttttccagcagaatctccattatgtatgaatcaagatcctggctgacattttctgccttggctgttgtgagctttcccgtcagaaatatccttcccatggggcctgaagtaattattttatatttattggcattaagtgtatgagagagagagagagagagagagtgtgtgtgtgtgtgtgtgtgtgtgtgtcagaagtggtgtatcagctgccacatagtaagagagcaaaggatcttcttttgtcttatggtgttttacctgtgctgattggttcttggcagcctttaaatgcctaggcagagaggaagagagaggttcctaagcttcatggtgaatttctaagtctgtgttgactgcaggaaatgtatgaggaaaggatggtggttgaggcctctccctcacatttaggccaggggttggcaaattgcagcttagtcctgtctgctgcctgtttttgtaaataaaattttattggaacacagcttgctcattggcttatgtataacatttggctgctttcatgctatgatgacaaggttgagtagttgagacagatgccatgtggcttgcaaagctgaagatattcattagctggctctttccaggaaaagtttgacccctgctttaggataaaacagagaaatggagagacatggaatagcagagtatcttttcaactaggttcaatatgaatgaacaggtcccctcagttgcacctgaaaggggccagaagtcctataggtttgggtttgggggagattgaagttagacttgcttggttcagagaccaggccaggatcgagcatttgccattggtgacctggaggtgtctggagcaggatccttttaaataggcaagctgcttgctgggaacacagttcaccttaagctttaaaaaaaattccttcaaagccaaaaaccatgcaaatatggagctgcctgacaagccgaatgattgatagggtagaaaatagggtctgtcataaaatatttgaggaggtggatttttacagcagggagaagcaggctgacaagtgccacttgttaatggtgactaccaccttccgtacctactgtgtgccaggcatagcaatagacactttgttattgtgttccgtctagaaacaaccctgctaagtagctcccagtattccccagttaccagtggaggctccaaagatatatcttttgtgtgaattgcacagcccacgatcagggaggaagccatcccctgtggtccagccctctgcacaggtaatgggggaattagctggaattgcagccatcctgtaggacataaggaagaacatcttgactgtaagcatggttaaacactgggatgagctgtcagggaagcgtgagagatccccatctgggaggagctttggaaaggagaaacatttgtaagtctattttcagctttcagctgcatggtgacacagggcattggccttgatggcctctaggagatcttgtgacctttctgatttcagcattctctctcctgtcacatcagaccctttgctggtttagatcacaatagtactgccagtgctgcacccttttagaacttctaaggccatgagttattggagattcagtttccagggtggttcttgaacctaagaaatcttctagaagcctgggtcatgttgtgaggtccttgtgcctgttgggtcgtggttctgtctgcctcaggttactgttggccccagggctctttttcctgcaggccttagttagcaccatgaatggttaggggtatgggggtcagggtgagtggtcaccagtgggtttcaagggattggcctatttcatctaagttgccaaacttatgtgcacagagttgttcgcagtatttccctagcatcttcttaatgtgtgtgggatcagtagtgatatcccctctttcatttctgattttggtcatttgtgcctttctttttttgtttgttagtctgctagaagtctgttacttctttttgttgggtttactttgttcatcttttaaaaaaaattttagagacctttcctcttttctgatataagcatttgatgctgtgaatttgcctccaagcactgctttagctgcatcctacaaatttttatatattgcatttttattttcagtcattccaaaccagtttctaattttcctcgagacttcctttttcatctgtggatcatttagtagtgtttaatagtaatgtttcatttctaagtatttggaggtttttccaggtgtcattctgttactgatttttagtcaaaaataaatgtattagtttcctattgcagctgcaataaattgccacaaacttagtgacttcaaacaacaaaacatactaccttatagttctggccagaagcttaaaagaggccttatagggctaagtcttagttttccttcatctgagaaggtctttattttgccttcattcctgaaggatattttcattggatataacattctgggttgacagttcctttcttttaggactttaagatgtttcatccccttctggcctctatagtttctgatgggaaatctacagttacgtgaatccttattctcctgtatgtaatatgttgtttttctctgactgctttcaagacttttttctttaactttggttttctgtgcttttattatgatatgtctggctgtagttttctttctttatcctgtttggggttcactgcatttctcgggtctgtaaatttatgttcttcccctaatttgggaagtgttcagctattgtattttccgatactgttttctgcttccatctctcctctctttctgggacacctgggacatgaaattagacatcaacatcttttgatgttgttccatagatgcttgaggttttattccatttttctccatttttgttttctctctcttatttagattggataatttctattgatctatctttaagttcactgactccattgtcatctccattctgctgttgaacccctccaggtaattgtttattttttggttctaaaattcctatttggttcttttttatagcttctattttttttggctgagaaggcctgtctttttatttgtttcaagagtctttgtcctttcttcttagagcatggttataatagctgctttaaagtcttagtctgataattcaaacatttgggtcatcttggggttgatgttagttgattgccttttcctttcacagtttatgttgcttagttctctgtcaagtaattttgggttatatcctggacatcttgagtgtaatattatgagactccggaccctgtttaaatgttctgaaaatgttgactgatttttttttttttaaacaggcagtcaacccagttagattcagatggcatatcctggctcactttctcagctctgtggttccggtatccaccctgctgttgaccactgagggatcagtttgaaactgggcagtgatctgtgctgtgctgattctaagtgttttcacacatgtgcagtttaggggtgagcccagggcttcttatgaagatttaaaggatcccttctccagctccctcttctccatgatcttccctatactctctacttccccatgtcccccctttcaggtgttctgattagaaggcagttcccccctgagggtccactgttgctgtgctggtgaagggggcaggggcttcacctatttggtggcgcttggttagtgtagagtggaaagagtccacgggtctccaccccagggaggccgctgcttgcatctgtggggagaggaatggacacgttgtttgtgctggggaaaggtggataaagccaaaagagttcaatctacaggatttctccttcctgggcttttggttagagagagcaagcttttctgtttggttcttttttttttttcctcttgtctgtgcctgttggtagtttcaagctactctagtgcccatgctgggaggcaaaattccaaaaactggaaaaccagaaaaatcactgccaaggtgtccttaaagtcctgcaatctctgctcagtcctcctgcccttatctacctttttgagtcccatgatagaggtttcatgcagaatttgtacctgtggatagtgggaaaggctgtagtgtgctttttccatcttgcctggaattggaagttccaacttctacatttagacgtccttctctctgtgtgtggtgatgttccctgggatagaccactactgcccttagacagcattctgagggtggtggcccatactgatcacctcagcccacccagtaactttcctgcggcccctcccaagacccccgccccaacagggctaagctgatacacacactgcggatgcaggcctgcctgctgggccttcctggtgtttgttttttccaggcaaagcacctctctctgcctcctgctggtttattcagcagtgtcccagggtttgctcattgtctgctttgcttcagacccttctatcaaattccattgtctctgtcttaatggtctttgcagggtaggcatggccatctgcatgttcactgaagggcctgcctgcatttccagggagagaaagccttcaggccactggtgcataaagatctttggaaatgtccagaagatcccaaacattgcctgtcctgcatgccaggcctcacttgccaccagcctgctccccagccgcacatccagctgtcatttcctagagaacccatcccacgcagttgttttggacacatagcgttccttcagggaatgtggccccggggccacaggtggagtagagggcacagtatcccgaaccatctaacggggcccgactcaccctcaccatgcaccaggccagttatggtttctttctgtgtcttatttccccctccatcaaatgagagttattgtagaaaccttatagtgctgtgttgggattagcagtaaacagtttggcatgtggtagatgctcgggaaatggaagctgcccttttttcctaatgggaaagaagggattttgtttttgagacaattcccttcctctgctgctgcatagggacacctgggtgcctttctaaaattagaccagggcatggtggcttgctcgtaatcccagtgttttgagaggccaaggcgggaagatcacttgaggccaggagtttgagaccagcctgggcaacctagtgagactccgtctctataaaaaaataaaattagctggatgtggtagtgcacgcctgtagtcccagctattcaggaggctgagtcaggaagattgcttgagccccaggagtttgaggcaatggtgagccatgttcatgccactgcactccagcctagccaacagagcaagaccccgtctcataaaataaaataaaataaaataaaataaaataaaataaaataaataaaataccaacagcctgtgctggctggagccatggtgttaaaaggcccatggacttgggccatgcctgagctggctgtgctctgcctgccacttaggctgcccctccctgacccagcttgtgtggaggaggcatggaatcctacaggaatgtgaagttcatccttccctggatacttgggcaccatctggccaggctcatggagcaaatgggcctgtgagttatgtccccacccgtgcctacgcccaacctttatgccccgtttttagtgggagaattttgtttggagctgcaggtgttggggggtggcacgtctcaggctttggggtcttcctgttctctttcttggccctgctccactccttggttcccctggccctgtcttgcctgcctgttaactttgggtaccctcagcctgtcccaaggcagctcatccctcaggccctgccctgtcttgtctctccagcctcccagcccaggggcttgctctccatgtagtaactaataccttagtgtgatcctctaattttctgttgctttcttgcttccatggttgttggaagcctggagacccagtgtttggccaaggacagggcctgctggttttagagctcctggcccagtagggatgataggacccaggaccccaagtgctctaggcaggcactgttctgggtgctgtaaagcacggtgcctagcacctcacagggactcggggtgtcctggctgaccagccgaatccactttttattgacaagaagcctgggtcccagagacattaagtaacgtgctaaggtcacccacctgggcagtggtagggctgggtttgaaccaaggtctgcactgcccagctcatgaattctgctgcttgggagccagcagcactactggcacaagggtagggggacctcaggcctgtcagagagggtgcctggctctttgggagtggggggtgcaccagagtgggttggagacaggacccagagcaccaccctttacctgaccagcatcttggtggggttccccacctggaaaggcaggaccctggggtccaacagagcctattgcagatccaggttctggcccagctgggatgctcactggcttctgtggcttatcagcgagcctacctgctgcacccgtgagcatgggcggccccatctgcctcctccttcaggtgagatggcaggatcagagagatggaatgaatgctgccgtgtcgcattcatgtaggaaggccttatttacaaaccatctgtagcagtcagaaggcctgatgtggtcaggccagaccatggagcccctgttctggatccatttggcaaagatgagagagaagctgggttaggctttgttgggtaaatgcaaatgccacatctgtgtgtgcacacacataggctgagacatttttctgcgaggtgggggatcgcattgagggaagaaaaggtgctctaatagcttcagcctggacttgggtccagagctttggatagaagcatctttccagacaattgggatcctgtagaaaatctgccctctgaggctcttctatgccttctgttgtgtcctgggaccccttggcatctccaggcagagcctatacagagcatccacatcagagtcccctgtgggccccagtgcctgtagttccatctcctgcctggatgctcggttcttggagcgagcttcctgagcagcctctgcaggctccaggctctggcagcatctccacgccactcctgccggcctttctcctggtggaagcagcctgcgttgcttctctgcccggtggtgacaggctgttctcgtttggaaacagaagagacaccactgcttccccacaccgacttcctaaaacatgaggctcccttctgtggtgtatgtgtaaaatgcctggctctgtatatgcacgtggtgcacgcctggccctggggtcttcacattcttcagaagaggccaggcatggaggctcgtgcctgtaatcccagcactttgagaggctgaggcaaatgaatcatttgaggtcaagagttcgagaccagcctggctaacatggtgaaaccccgtctttgctaaaaatataaaaattagccaggtgtgggggcttacactcttgtagtcccagctattcaggaggctgaggcacaagaatcgcttgaacccaggagtcgggggttgttgtgagctgagatcacaccactgcacgccagcctgggtgacagagcgagaccctgtctcaaaaaaaaaaaaaagaaaaaaaagaaaaaaaaaaagaagaacatggtgacttcacctgcccagggaggcgtgccagccaggggcccatggagaatcagatattcagccagggacaagggcatgtcagtgggcagagtgccagggtgtgggaggctctctgggtggtcgctgaccaaaaacatcacttctgggttttgtgactcagaaatgagctcagcctgtataccctgcagatgtgatgagccccaggccgagtcctctgggggtgtcattaatggcgtgtgcatgagcattttcttctggcatttttacagagaccatgtgcagctggactctccggagacagcaaacagaaattctattatgtgtcctatcagctagtaaaggaggggagcttgccttgagttgtgtttttctgcgaccctgtgtgtttgatccttgtctgcacccagtttggccaccctgacctctgtcactcccaagtccgaggaaccagtggttatgtgaatgtgaagttatttacttcatctgtttatttagatctgggccctggggtggccccatgcgttgaataagtgtgttctacagaacccatggtccctgggttctgggtgatcagtggcctgaggagggaccagactccagcccgtcctaaggagcttatgagaagttttgaggggactggtgcctggacatgggctgtagcgtaggtggagtgtcgaggaggaccctacacacggtgagtgggagaaagcacctgggagagcatcccgcagcccaggagggtggtcaggttaagtcacagcagggatggggctatcagaatggtgggctgtgaagaactgggagggccaagactcagggaggccatctggatggggaaggtgtgagccgaggcccagaatggagcacccaggggacccaggctgatcaggtcgcagcgagcatgaggggactgtgcgaagccatgagctccagactccccagtcgtgggccctgatgcgggggtgtgtgtgagctggagccgtgggaccagggccgaacccgtgtgctggacagtcttcggggcccagacaccaagggccacccggagcctacaggaaagttggggagtagaggggcatgtgttgtatggacagagccctaccatgcttagaggagtcaggctcctcccccgactctgtggccacacattgtccctcacactcttgatttctcagccacagtgagggtgaaaaccagggtcagctcgagactatgacccagttcccatttcacctcctgggtcttctccaggttctgtggggttttttgttttgttttgtttttttgagatggagtctctcgctctgtcacccaggctggagtgcagtggtacgatcttggctcctaggttcaagtgattctcctgcctcagcctcccaagtagctgggattacaggcatgcacccagctaatttttgtatttttagtagagacggggtttcaccatgctggccagactggtctcgaactcctgacctcaagtgatccgcctgccttggcatcccaaagtgctgagattactagtgtgagccaccatgcccggccttctccaagttccgaattccctgaaagcagctgtgctgttgccctgccctctggggcacaatgttaggagtaagcagcgtttaagtgcctccctgattaagagaaagatgtatattcccactgggtggcgaggacatagatgtccaggcccatgtgttccacggcataatgtggggactgcagagaggaagggacatgtttatgtcccaggtgagtcatggaatctcagaatatgagggtgtgcatgtcagattttttcaaggaggggtgtcttagtcacttcaggctgctataacaaaaatgccataaactgggtaccttaaacaacaaacacttactcctcacagtgctggaggcaggaagtcagtatcaaggagctggaacatttggagtctgccaagggcccacttcctggttcttagccatcttcttgctgtgttctcacctggtgtggaaaggatgggggctgtctctggggtttcaaaagggcactaatccccttcatgagggttccgtcctcctgacctaatcacccccaaaggccccacctctaaataccatcacattgggggttagatttcaacataggaattttgcagagatgtgaacatttattctgtgtgctgtaaggggcatctcagagtgccacccccacatctccaaagctgctggaccttgcatatgggagctgactctcttggggctggtgtgactcatggctggaggcctggcttgttaacccagctctgaggtcctctgggtgccacctcctgcacaccagccagccaggtggcctccacgtaccttctgtttcatggagaagagctacttgcttaagacaggttcctcaaacccctggcatctggtctcaggtgactctgagcatctcatggctacctcctccccacctgcagcctcatctccaccctgccgcactctatgactgagcagcacagggcgccaggggatgtttgtctgcactgctgctgtgttgctgacttatgagacctctttggaaggggctcaacaggtgaggagagtggtgtgaatccacttgtcctaatagaccactccaactttctgaacatcccaggctttcctggtacagtccccatcttccagccaagaggagagcatggctcaggtgggattcaggcgagaacagggcaacgcacacctactagccaagatacaaagcacttaatacagggaggagtcatgtgggcagagcccagtgggtctgggttcccctcatgaggaccgagaggggaccaacacctgttagatgtctgctgtgttcctgacgttggcctgggtgtgggatgtgactgggtgtctgttgctctccttggcaggtgcctgccctggaggtaaagaggctgggacagtaactttaggcagtcagctggggtctgtctgttaagcaaggagcaggaatcagccttgttctctactggcctgtctgggaagcgtgaacaaattctgtgtcttgaatagtacccgagtcagttgccagccctgtgctggctctggcagggggtagctgtggaggcaagagtgttgggcagggtgacctgattgagccaagctgttattcttccacctgaggattttccagaagaagtgccaggctcagaaccggcgtcagatacctctgagagcctttccggttgccacggttctcccaggatcgtggagttcttgaaggaaggccttttcctggcgtgtctgcagtggcatggtgatatagccacgccgcccctgtttgtgagttgaatctctgcagaactcacttttcccaggaggtgctttcagaatgcagcataccacagtcctcatcaggatctgctcatttggctgggctggcaggtggctgagttggctcccggagcgggtgtctagcagctgtgctcatggaggcaggctgggcgtgtgaatctcacctcctcccacggccccctggggaagcaggataggagctgggcctggttcccgagcctggccgattgggagtaacaggtgggatctggaccaggttgtcacacccacaatgacagctgggattatcaccgtgggtggtaattcccacatgacagtttcgagtttcaggtcaagagctgggtcctctctctcctcttgcatctggacagagagatccttgccggctggttttctggctcgttcctcagctgttttctgtggcctgcagagtttgcagccccaggggagtaaggaaagctctgctctggcctgatttttgctggagaagagaaatgtggaagtcagggtggtggcctttgcagtgggtcagctttgggctgctgagacgggcggcgtgaaggccggcttccagagccctggctggcctttgtagtggatgagacggaccagattgccatgctagggtcacccgctgacctgcagtggcctgagcagatacatggctctgccagatttcctgaagtggagccctcagcctcacactgcatcccccagaagccaggcaagaggaggtcataaggtttttctggaaaggagcgaaagagtgcgctgctaaatgttgcaggtgggagtgcgtgaacaggtgaggcttccggtaattatgacaagtgatgcttgtgcttctcagtgccgtttcctccctctgatggggcctgcttgacacctcgcagggagcgtgggtggagagtgtcattatccccatttcattggtgggaacattgagagatgaaacgaggagtttcatctgcaggcccctgggccctctggtcatcccggtcatcctggttggtttattgtcttgttttttaagggggatgatcgaagaaagccttggaggtagggtgggggaagctgggaacagagggaattatatttccttttccaaatacttgtttaagaatggaagagttcctggccacataatccatgtgcacagattttccgggggaaaatccatttgagtttagacttggagaccgtgccacctcccggtctgttcctcaggcttttgacatctgcccacacctggaacatcttaaattctggtggagaatacaaaacgtcactcccctgccccagctcacccctagttcagccccccaggatacctgaagttggggatcctccttcttagctgtggagctcagggtatgttggttccacgtccaaaccttcaaccttcatctgtaaaatggggtactgatggctcccttgcagaggcctggggattcgaggcagcacttctggcccgtacctgttgccatttctgcatgttgtacccctggccctgactcaggctggcgtcctgaacacctgtgcatccacaaccccataagccttccaggagcactatagatcagggtgacccaggattaggccgggggtgggaattacagactacccccaggactgacccagagctatacccctccagggccggtgggaacacgagtggtttttgtgtgtgtatgtggcttgcagcttgcaaggggggtggggggcaggtggcggggttggttcgagtctcaaactgtcctctgtcgggtcgggtcaggcctcaaactctcctctgggccatttccttctttttctcaacagaaagaacccaggctatggaatcatgtgtgggcccagcagggttcataggcaccttctcagtctgtctccagcgttgggctcttctggtcctgcccagcttgtcgctttagtacctcagtttccttatctgcatggaagcccacctgtcagcttggatgaggggaggaaagcaaagcccctcaggccctgtgtgggaaggagagtctgaaagtgcaggggctgtgctcaggaaggagcgcagcttcaggaggggctggttggctggcagtgttgtgcaggacattcagaacgtgactgggtttctattctgatttgtacaagcataggatactcaggtggctctggtctgttctctagcaggagagtctggggtcaatctgtaataatttagcttctgagcaggtgcccggcactggaagaggagagcccaagagagcacggatacattgtgtggctgaagggggcaaggccctgggctgcctcctactctgaccttgtgggccttggtgtctgctcttcccctctgtctgccactctgagtctggaatgtggcagtgatatgggtgttgtgggcactcctggcatgtgggcagctcctcagtgctggtgtctgagctccacaatgacttcattcatgtaatagtatgttatggctgcgtaacaaagaaccacaaactgtgcagcccaaatcatagaaatttatcatctcacagttctgacgactggaaatatgagattgagatgttggctgggttggatccttataggtggcagttttcaagttcacatgacattctccctatatgccagtctgtatccaaattccacccacccacccccacttttttttaagagacagcgtctccctctggctccagtcccaggctgcagtgcagtggcgcagtcatagctcactgtagcctcagcctcctgggctcaagtgatcctcccacctcagcctcccaagtagctgaaaactacacttgaccaccatacctggctaatttttatatttttttgtagagacacgttcttgttatgttgtccaggctagtctcgaactcctggcctgaagtgatcctgcctcccaaagtgctgggattacaggcatgagccaccacgccaggccacctcttttttaaaggacacagtcacattggattaggacctaacctaatgacctcattttaacttggtaaagaccctattttcaaataagtttagaggttaggacttcagcatatgaatttaggagggaacacaatttagcccctaaaactgtacttctattcttttgttttaaatttcagagcctggctgatcgtgtgtgtgtgtgtgtgtgtgtgtgtgtgtgtgtgtgtgtgtctgtctatgtgtgaaaatatacataggccgggcgcggtggctcacgcctgtaatcccagcactttgggaggctgaggcgggtggatcacgaggtcaggagatcgagaccatcctgactaacacggtgaaaccccgtctctactaaaaatacaaaaaatcagccgggcgtggtggcgggcgcctgtagttccagctaatcgggaggctgaggcaggagaatggcgtgaacccaggaggcggagcttgcagtgagccgagatagtgccacttgcactccagcctgggtgacagagcgagactgtctcaaaaagaaaaaaaaaagaaaaagaaaaaaagaaaatatacataacatgtactgttttagccatttttaagtgtgcggttcagtggtattcagtacatccacattatcatacacctgtcactactgtccatctccagaactttttcatattctccacactgaaactccactaaacgctaactccctcctcccctcctgtccagcacctcacaaccccctttctactttctgtctctatgaatttgactactctaggaacctcatatacgtggaatcttacggtatttgtttgtttgtgcctggctgatttcacttagcataatgtcctcaaggcctatctcagtcagcgtgtgtcagagtttccttcctttttgaggctgaataatactcctttacatgtatgtggcacgttctggttttccactcatgcattgatggatgctagggttgctgccacctcttggccattgtggatggcgctgctgggaatgtggtgaatgtgcacctcctctcctaacctgccccaggcatccttcagaagcggggcagcccaagaccgagatgggggaagaaggtggtttgcctgccctcccaggcttgctgggtgtctgcccgtggctgggccctggccccgggctcagggtggtgaccgccagcagggggaagtccctcttcctgccattcccccccgaccaaccctctgtatttcctctttggaggggcagtgagtgggaagggaggacccacaggtgtgcagcggccatggcccgcatcctggctgagcacctttgctggtgtggagggactccctccagtcactttcagacctcactccccatgctgctcccacaccagggcactgttcccacgccatcctcctttgaagggcactacccatcttccctgtcttgccccttcccaccctcttcccagggacttttctggtcagttccctgctgccaggtctatacctcagggactagaagctcagcatcccctctgctcttcctccttttgcctttgtcctcttagccagacccaggctcactgtgcgtcagtgcccctgcctgcgtttttctaccaacaccaggcctacctggagtgaccatcgcagaagcccccagccctgccccacctccagtgccacactcagatgtgctgccagaacgtcacctgtctccctgcagcctctaggctcccctcttgttccagacccagacatctcctaaatggagcccaagtccttggcctgaagcctgaggctccccacaaaatcaccctcttcctctctctcctctcactgccagcctgtatcccctttcccagctgtaccccctttcccagagaccacttccagccccccttagctcttagtggcctctggctggatctagaaaccaaactgacaccaggtacattaacaagagaaaagcacacaaatgtcattagttttacaggtgcatgggaaacttcaccagagtcaagtccagacaagtggccgaagcaagatgctttatcctttttcgataaagaacaataagtttgagaagtggcaggacaagggggatctggctaggggcagtaaattcttgagcagtcactgggagatatatgaggggtgtaaacctggtggaagataagggttactttgttaaagcatatttattcaggcccactgcagcccccgattccatctcaggtgataagggctattttctcccctggttcaaggaagacacccctcccagaggaatctttatggcttgctgagtatagcaagaaacaggtcagctagccctttctgaagctgcagctcgaagtcagtgtagccatccggtgtattttgggatggcacgtccttcactctttcccagcctttctgcatttgtaagccccaggaaagccggcagctgagtcagcctgaatccctccatggggcgtctttgcagctccctgcccctgctggttgaaggctctgttggtcgcattcttctctctcacagactctgcccctccaaagcccttccagccctctcctgggggctgggttatctctgtcctcagactccatggcaccgagttcaggccatgtcttagtgtcctgtggcttccttaacagaatgccacaagcttagtggcttacaacaacaaacatttattctctcccagttctgaagactgaagtcccacatcaaggtgtccgcagggccaggctgtctctggaggctctaggggaggatccttcctttctgttcccagcatctgatggcccacggcattcctcgacctggtgacaacatctctccagtccctgcctccgccttcaaatggcctcctgtatgcctgtgtcttctgtctctttaaagatatttgtcattggatttagggtccatcagtgtgatattgtgatataagaaacctgtatgtggtcttccttctggtttctggcacaagctcctaaaatcattgtaattttctgaacgatggggtgataggagcatcttttgttattcatacaagcccttttctgtgggacctgaggttatgctaatgaggtgatgcttgaggggcccctagatagctgtgggacggggctggttgccagaggaaccagccacgtgattagagggttggaactttagctccacccctgaactctggggatggggagaggggtggagattgaattgatcacccgtgtctacagccatgccagcctgatctcggctgaactgatcatcagtggccaatgatttagtcttgcctacctagtggaacctccatgaaaacactacacagtgaggttcagagagctttcacgttggtgaacacatgaaggtgctgggagggcagtgccccaagaggccatggaagctcccccacaatacacaccctgttacccagccctcttccgtttggctttcgtgagtggtatcctttacaataaactggtaaatgtgagtaaaaggttttcccgaattctgtgagctgttctagcaattttttttttttttttttaagatggagcctcgctctgttgcccaggctggagtgcagtggcgagatctcggctcactgcaacctcccgggttcaaatgattctcttgccttagcctcccgagtagctgggactataggcgcctgccaccacgcccagctaatttttgtgtttttagtagagacgcgatttcatcatattggccagactggtcttgaactcctgaccttgtgatccgcctgcctcagcctcccaaagttgctgggattacaggcatgagccaccgtgcccggctctagcaaattattgaacctgaggagggggttgtgggaacaccccatctccactcccagctttagagtcagtaggtcagaagtacaggtggcccagacttcccccagtgccttaagtgggaacagtcttgtggtactgagcccttaacctgtgaagtctgacacttattccacatacttactggcagaatggaattaaattataggacacccggctggtgtccagagactgggaggattgcctggtgaaaggagaaaacccacacgtgtgttgtcaggagagttctgggggaatagaaacacatcatagtagtagtaattggacaatctagggtgatctcatctcaaagcctttaacttcattacatctgcaaaaagactctttccaggtaaggtcgcattcgcagattctagggttaggatatgaacgtgttcctttgggggcccactacagtgggcttctcaccttggtgtcctcaggggagccagtgtctgcctccctctcctccgttaggtcctggctccgtggtcatttcctcagggagaggccctgctgtccttcctgggtctgtcttcctccctcctgcatgtgctccggtgccacctgcctctctcccgtggccttgtcatggttgctgtgatgcccacgtcacgtgactccatggattccgctggctcccatgggcaggggctgggtgtgcggtgctcaccattccatacccagcacagtgtcctgcacgtattagatactcagtaagtacatttgtctggggctaaaccttcagggtctccaggaagtctttctgagccccagagtcctaaaaagcccaggtgctgctgaggaataataactgtatcatcctggggcggagggctgctgcctcttcccagctggggtttcagcctctgccctgcccccgcaccagccggcccccaacctgaagcctagagcatcaaattattattgcctccgggaatgactgggagccttaggcacaggtgggtccttggagacaggggatggtcctttaacagtgttctggatcctgatggagaagagagggggttctcctctgcccacactgaggcacactcggcttgtggaggaaaacggctgactagtgcccccagaaaatcgccagcaaagttgaccttctggtgattcagtctccaaccagctcaaccttcaagcaggcagagctgtcagggctggtcgtgtgggttggactttctcctccaagaaagctcagagttgtaaatacctgtttctcatctgcggtgtctagggttgcctggggagtcaaggcatcagggagcaggacaggctcaggcccttcccgactgacattttccagcctatggggggccttggctagcctggtggctttctctgtggcatacgctgattcatgaccctgacctctctctacccgggcagctgcggctttccattcttgggtgctggcctggtgatgtcattgttggggtacggcatgagggctgggaggccacaggatcctggggtgctctctgtgtacccttccaccacagaaccaaggaccctggtggcaggcctttagccagggtgcggtggctaactggatggggcacgtctcatttataaagaattttgaggcacttggcgtggatgcaagaaggggcagctgccagcctggcagaggaggagaaagtagagaaaccaccagaaccaaccacacatctccgaaagcactcactgcatgtgggtggcctgaggttatggccaggcggtactgatgtccatccggaaggatactctcagccctcgggaaacagtggaattatgttccgggttccctgcttaggagaggaaaacaggtcagccttaaaaaaaaaaaaaaattgaggtaaaattcacataacataaaatgaatcattttaaagtgaacaattccgtggcttttagtgccttcacagtgttgtgcaaccaccatctccgtttagttccgaaacattttcgtcaccccagaaggaaacccctgcccattaagcagtcaccgacctcctttctgtctttatgggtttacgtattgtggggatttaatatcaatggagtcatacaacatgtggcactttgtgactggcatatttcccgtagcatcatgttttcaaggttcatccgtgttgtagcatgtgacagaatttccttccctttgaaggcagaggccgggtgtagtggctcacacctgcaatcccagcactttgggaggcctaggcgagaggaccacttgaagccaggagttcaagaccagcctaggcaacatagcgagacccctgtctctacaaaaagaaaaaaaaaattattttagctggacataatggcacacacctgtaatgccagttacttagggggctcaggcaggagatcacgtgagcccaggagttcgagactatggtgagcaatgctattccattgaatctgatggacatttggattgtttctacctcttgtgaataatgcttctgtgaacattctggtacaagtttttgtttgaacactagttttcaattgttttgattatacacctaggaggggagttgctaagtcgtaaggttatcaatgccacatcttagaaatgccttctctttggaatgaaagttgacccagcaggcaggtcacacaggtgcagctgggcacagtcaagctctgcctgagactcagtttttcctgtctgaaaaatagcaatctaaaagttcatgcccactcaggtgcgtattccaagagatgatacgtgggttttcagcaccatatgtgacctggaggaagtaccccgtaaagggtggtgggttttttttgcccactacttcaaagatttgggtcttttttgctgtcagaggaacttacctccctgaagcactacgggtattccctgaccttacctgaggttctgctacgatagccagcttcggagcccccaagatccacagcccttctcgagggtagagtctgctcttggtgggtgcatggtggtaagaaggtgccaggctatggatgagcgtggggtgcagagccagctccgactgtggactctgcacccttcatgagacccgaacctctgtcccagccatggttttccaagcctctctggaggacagtgcctgcctgacaatccctccaaaagacgtgtgctgctgtttgtagaagtcgctggcaccatgctgccatggcctgcctaggacctgggagaagatgggaggccaagaggagggcaggagccgggaaggaggacagctgcagccatgacagggtgggggtttgatgtccgcctctgtgaaaacctccaccacagctggccgagccaccggatgtttgatctccttttacctttgtaaataaatactgcctagtctttggctgccagtgtaaacaaggatggagaccactctgctgatgatctctgtgctccctggagttcctgcctcctccacccaaattcctcccagtgcccctttcttctcttgactccagtacatgttgatcggagggccctttacagccgctctcattgttctgggtagggagggcccagagcatgacctctgatcccctgagggcttgctcccatctcaccctggggcacattggcagaggttgggtcaggggctgggttcctggaaccccacacctctggcagccacaccacggatggaggatctggggtctctctaggcatatctggcctgggagagcctctcctgcctggctgtacccaggcatcacatggccgatggtctgagctcagttctgcatgcatttcctgggagcccaccgttccaccttctgtctctatgaatctgactactgtaggtacctcatatgagtggaatcataacaatatttgtccttttgtgtctggcttattccactaagcagaacatcaaggttcatccatgagattgcatgtgtcaaaatgtccttcctttttaaggctgaatgatgttccattgcgtgtatacattacattgtgcttctcccttcttctgtcagtggacattgggttctttccacctcttccttcccatgttgtgatgaatatgggtgtgcaaatatgtcttcaagttcctgctttcagttcttttagaggctgggcgcagtggctcacgcttgtaatcccagcactttgggagactgaggctggtggattacttgaggtcaggagttccagaccagcctgggcaacatggtgaaaccccatctatacttaaaatacgaaaattagctgggtgtggtggcgcacgcttgtaatcacagctacttgggaggccaaggcaggagaatcacttgaacccaggaggtggaggttgcagtgagccaagatcgcgccattatactccagcagtgtccgggcaacagagtgagactccatctcaaaaaaaaaaaaaaatcagttattttgggtacataactaggagtagaattgctggatcatgtggtaattctgtttaattttttgaaagatttttttttttgaaccagtgtagtctaggggatgtgaccgcagcacctacctgggcctgggctgactgggacctaaccaggcattattcttttcgctatattatttttattttttggctgccctttttccttttatgaaagaatagatttgcagagttctggggttgggttgctaagcaaactgcctggagagaagagggtttcagatttcactaggccctccctcttccacaccaaccctgggctgtctgcactggacttcctctccccagccccactcctagtctggttcctggttcaggtgagcagcagccagattccatgcccccaccttctaccttctagtgtttgggttctgccttggataaagctttgcaggaaggatgtggctgatgagaccatcaacctcagtcctgccaagggtgaggcggcccagagaggtttttccactgggtattcctggtacgggggcaggagccaggcctcccaattggttctggctcttgggagatggtggctttcaaaatgccaaataatgtactttatcctcaagaggaaagggccttggctgggcatggtggctcaagcctataatcccagcactttgggaggccgaggcaggagggttgcttgaggccagagtttaagatcagcctggacaacatagcaagactttttctcaaaaaatgtttttaaaaattagctgggcaggccaggcacggtggctcacgcctgtaatcccagcactttgggaggccaaggtgggtggatcacaaggtcaggagatggagaccatcctggctaacatggtgaaactccgtctctactaaaaatacaaaaaaaaattagccaggcgtggtggcgcacgcctgtagtcccagctactccggaggctgaggcaggagaatggcgtgaacccggaaggtggagcttacagtgagccgaaatcgcgccactgcactccagcctggacgacagagcaagactctgtctcaaaaaaaaaaaaaaaaaaattagctgggcatagtggcatgcacctgtagtcccagctacttagaaggatcccttgagcccaggagttcacagctgcagtgagctgtgatcactccactgcacttcagcctgggtgacagaaagatcatgtcgctgaaaataaaatcacgggtggggggtggtgctttgtgtacttaggggagctcaggtgtgaaaaactgcgttttgaaaaagcaggttcctgtgtgctggttagaatggggggatgaggaaattgaggggcagtcctccccacaccatcatttgccttggagcagactggaagagtcagcagaatgaggggcaacaagtatggattggagtgatctgggtgagctgaggcaggggctgaagccctcatatggaacgtggcagggatgagcaggccatctggaatccagacttaaaagcatcagtcacccagacattgatttgagatctctgcagagggggaaacggctggggtttcagccacttggagtgtcctaattccccagcagagtctggccgtgagacctagtctctctgtctcacctggcggggtgatgtgtccacttcaaagtctcactggacacaggcaggcaaaccctcaccgggcacttgattcttgcaccaggttttagcgtggacgttgctaagccagcatgtggcttcgcacatgtggagtcttacagttactctgaagcaagccctgggaccccgaatctgaccccgaagttcttgctgggctgactccctactcggtgttgacttgaccttacacgggagtcagtgtagtcatgggctcggaaagcactcagataaaaggtgctccacccagtgatgaagaatgtgttgatgtcttaagatcgtcttcagataaacagcaaaaccgttggttaaaagctggtctaacccaccttattttgttgttgtttgttttgttttagacgtttcgcagcctgaagctgtggttttagtctctttctctagtgataagtggaaaagagggatgaggaaggggctttgctggcccgaccaaaaacaaaactaagaacccatgagtgtattctctcccttgggcacttggacacctctgctagaacatttagtagacgctgacaattccaagctaatgtaaaagccaagtctggagggtcatggggtgggagactagggtgaggaagttgttaaaggaggccaaggggatggcacggccttcatctaatagtgacagtagcattttagagctagagggtctttatccattgtctagttcacatgcatgattttaaaaaaggaagctgaggcaggaggattgcttgagcccaggagttggagactagcctaggcaccttagcgagtcaacgtctctgttaaaattaataaatgaagtcaagaaaggtgaggcatgggcggcctcagtgacctggactaactcacagagaggtagcaatggggagggccagagcctcgcttctgagggattacaccacagctcacttcccccacccaaaggccaaaggaactgagcgttaataaccaacatagcgatcttggtacctggagccccctcgatgtcccatggattaaggagaccagattcctccatacagcttgttgagggacttggtgggtgccccttgctcttggggtcttcctactttggctgctatgctcaacccagacccagcctcttcctggaattctcctttcaacacgcacagagacagaacccggcccggactttgcagccagtagttgtgtgcaatcacctgggacagtgctgcaggtcagcagccggcaatgctagacaccgggttggggtcgctcagcaggtctaagccctggctgccagctagattcccccaggaagcccctatagcttcggattcagcaggtctgtgtggatcccggtgaaatcgttttcaaagcctcccaggtgttgccgacgtgcagccagggctgaggacacctgttagagggtgctgagtcctgtgggacgagaagtggagaacctgggagagggagaggcagaggtgtgcaaggaagccggaacttcggccacctgcacccacagctagtggcagatcactccagacacacggctctccccggccttccacgtggaaaggactgacaacagtctccacttcaggattgctgggtcagttgctctgagtgcctgagggcagccctgtgcccacccagcctgggtgtgtgtggtggcagttgtaaactcctgaatgaacaccaaggtcacctctgctggtaacctttgggcagggctgcttacaggtgactcatggtgagagtgacgtcaccccatcagggtgagctctcagaagtcccatgggcctcaaagtccccctttggaaggagtggagaagggatcctcacatgagccatggattgggccagaagatccttgtgggttgacagtggtcatgatgagtccactggcttagaaaactcaggctgagaacaggccatggaggagctccagatggctaaggccttggaaacacgtgttgagctttgtcattcagcctgggaggaagggagtgattatctccaggtgcctctgggaggaatgaattactctgtataaccagatagtcccaacaggcagggggcctcttgtaggataagccactctgtcctcctgcgggtactcacattggggtaagggtggtctgggatttcgacagacctgctggaaggtggtctatgactcagccagaagctgggccagactgggggatgggggaacctgtagccccagttccctgggctggcatcggaatagcatggtaggactcgctgctcatggtggacagaacttgcaccccagccagcatgctggcctgtgctcctcaccccatcagaccccatgggcaggtgtgcaaggtgcaaggaccgttcctgacatcaagacggtaacggtaacattttgggtttccctttctttttcttttcttttcttttttttttttttttgagacagagtcttgctctgtcacctaggctggagtgcagtggtgcaatcttggctcactgcaacctccacctcccaggttcaagcgattctcctgcctcagcctcctgagtagctgggattacaggcacctgccaccatgcccacctaattttttatagttttagtagagatggggttcaccatattggccaggctggtctcgaactcctgacctcaagtgatccacccacctcggcctcccaaagtgctgggattacaggcatgagccactgtgcccagccagggtccccctttctatagcaacccaacccccctgtatgggggagaaccaactgttttctctgtacacaagctcaacgcagaacacttatgtgaccaaatgtaggggtttttcccacaccaagcagttctctgcagacaccagctgggtgtcctacaatttcaactcagttttgacattgtctacctggagttagcatcagatcccactgttaagggctcagctccagaagactgcccctaacgtcaggtgtcagtagcaagtccaggttatctattggccgtaaattggaggttcctacagccccctccttgagtttgatcacttgctggaacggctcagagaactcaggaaaataacttactagctgactggtttttaatacaaagatacaactcaggaacagccatatggaggaggtgcacagaggaaggtctgtgggaaggggtgcagagcttccatgccctctcggggcactgccacattttcagcaacctggaagctctcctaaccctggccttttggacagccctcattgtgtaggcatgattgattacgtcactggccattggtgatcaactcaaccttcaactgtgggtcttccccagagagttgggggtgccaactctctaatcgtgtggttggttctcccggcaaccagcccccttcctgaggctatccaggagccccagccacctgtcatttactagcacacataaagacatgtattactttggagattccaagggttttaggacctgcatgccaggaaagtagagggtgggatatgcaaagatcaaatatacatttcttaagtcacaaccccctgccaggggcagacgtatctcagaaagccccttgtattgtctagggagtgagctcatgttcatcccccctcaccttgtggtctttgaccagtcagttgtgaaggggacgtcagcatacccgaggtcgttgtgagatgcctgttggggacagagatggtgtcagctgggtgcttgctgggatgggttgagtatggatgctcccttctctgtctctaacacaggatgcttctttgcacacacagatggctcgttcggaacaccacctggatacggctgcgctgcagaccgggcagaggagcagcgccggcaccaagatgggctgccctacattgatgactcgccctcctcatcgccccacctcagcagcaagggcaggggcagccgggatgcgctggtctcgggagccctggagtccactaaagcggtgagtccccatggtgtacgtgtggcaggagggccaggtgaggctccctgaagcgcagccccatgctcaggggtatgtagcaggtaggtggtggagcagccaatggtttggaagcgagtgggtcaccaaaaactccttcctcatctctacatgtggtacacagacagcctgccagatgtgttgatcagggagatcgggggatgctttgaactgagcgtggaggaggcaggcagcatgtggtcttgaggctgagaatgtcagcaccagaggccaccaccaagacctgcgtggtggcgccggcaacactcctgagccaggtggtgtctgggcttgggtccctttgcttcatagccttcttgctcccttttaccaaagcgtgtgctgaggatggctccatccatgtgaccagagcctttcctgtgaattttcacttgaccctcattaataattcttggcctttctgtcacttccactttacaaaggtgaaactgaagtccagtggtggcttccccaaggtctcatggctagtgagtagcggcacattcagtagatgctctgccatgccctccaagaaagcagtggacccacgccccccctcacatgagaacgtagcccgggctggttgcaggctggatggtgctggaccgcccggccctgcatgaagttctgattcctcttgctggtcccacagctcagggggctgcttcagcaatgctctggggcccagatgctcaccccttgccattggtgcatgtccccccacttgacctcttgggttccttacttcttgggctgagaaaatcactgccccagggcagttgctcctttttgtctttttggtccctgatgacagattacttccgcactctgcttagcttatttctagatggtttccaccatagcctggcatggtggctcacacctataatcccagcgactcaggaggctgaggtgggagaattgcttgagtccaggagctcgagactgcagtgagctgtgattctcaccactgcactccagcctgggcaacagagcaagaccctatctttaaaaataataataaaaaaataaataaaaagagcaagagagagatggacttttccccatttctgtaaggaagctccagaagtgtatcttctcactgagctgcttttttctggggctgacatgttagctgcacgcctgggactgctgcttacgtatatacttttgtgatttctgaaggccttggtgctgggcaggcttctcattctgaaccgagaggatgggagaggaagccagtgggtaacatgtacctgctccgtgcagcacacacaggctgctgccttaggtagcttcctatcccacgtcgagtgtcagctttttacagactaggaggccgaggttcagagaggtgaagtaacttgcttgggccacacagctccagggtttgaagccttcctgattcttcaatgggcacactttccctccctcaactgtcttgtctttcttggtgcacccctttcttgctgcattgtgagcgtggtttggtacaaagaaggaccaagttcaggtaggctaagtgctgaacttgagaaaggcaatttctttccatcattcttgagggctatctgcacccagccagtccttgatgcagttcctggccccgaaaggaagctgatctgcccactcagtgccccagtccctgtccgggggtgggggcctcccacccacacctggctctgacttggagtacagccttcacctttcagtccagggcttctcctctgtgaagccactccagatcctggtcccccgacccctgctccctgcttctgccctcacaggagctgtagatgtttctcgtggtgcacatcctgcaggaggttgcacgtctctgcctgtcaggtccagagtttccaatcccaagcacgccccttggcccagagctggtctgaagaggaggggatttgattggaggagaactgtgtgtagctcctttccagaaaccttctggtgctcttcccagtggttggggccccaggacgggtacccttcactgctctggagacaagcatagccttgacttcctggtttccctgccagccatgcaacaagccatgcaaatgtcatctttcatttctgatctttggtttgaagacatggctgtcgcttcctaggacacctgacttcccccagggagcatggtgatcttgaggccagaggcaccctgatcctgaccatccagtgggaaatgggcatcaggctgctcatccctctcctcctgcacgccacccacccctcatttggtcccagatgctgatcttgagtctttggggtgtcagtggactcctgtggcatgggtcttctctgtgaatacccactcgtagtgcagacagaggctggacagaggccaggcacccccttgcccggggtgctgtgggaaggattcacacaggctggcctgttgcgacaacctgcagccccaggaccctgtacagaggccagccccttgccctctggtatgccttgagggccaggttcttggggtgttcgccggctgggccgcaggacaatgtccagtctgttggtaatgaaaacctgcccttgcccagagcaagagggtcctttctccagcagctgtgctagctacacactcccagcccagagcagcctgcccctcgcagtaagggttttgcaccctgatcaccactgggctcccccagattagggggactaggaggagggactagaaggggcctctttgcactctgccctgtcctgaagctcagttccagctcccgccctcagttcacccgtgggcctggtagccagctgacaacagttttattcacctgttctctgttggcttttcctgcttggttgtcacaagcccagtttgttttgtgggttctttattggcttttatttagcctcaagttttgtgtttgtacccacctaggtagggtcatggtaggagggccttccttccatgtcactgacttctttttccaatttccctttacctccggcttcctacccgccccagcctccttgcctgcctccatggccctccctgcattcacgtcctttcccataactggcacaagcacagccctgagttataaatagccccaggccaggccctgccctttgctctctcgttttctctgcatggacttggctgatttctgagccatccctgtctgatgccatcagcactattcaggactctagaagattcttagtctaaggagaagtgcctcatcctgagtcttgtctccaccccaccccgtccatgccctgagccagatgttccctgagcggccccgcccttcagaacacggagggagagccagattctgccttcctgcctgtgctgtttttcctcctggctttccaaaccatgtggacagaacgagacacagtgctcccacccacgccggcacaagcatctcacactgggtggggctgtcatgggccctgctgccctagcagcctccctgggccctacaggccgcctggtactcatagtagcaagattgtccttagaacatgagcacggctggcaggctgggtggatgggtggcgctgcccaagggacccaccattcccttcacctcttctcctcttgtggagcagggagcggcatctgcacacagtaggaggcacctgcaggggcagctggggtgctttccccaaagactccaccattcatgatgggcagagagggggtgtcataggtcgccccaccctacgtgtatgtgcaccatgggcagcagacttgctgaacttgggtagcatttcagggcaccaaggcaggctcaactgacagccctgggttccttggacccaactgtctccaagtgagagtacggagaccctgaaggagccctcagagattcataaaaacgcagccaacactaggatacaaccaggtgtttaagatccactcattgatttattaaatgaatcttaattgagcacctgggtgttctgggcactgtgctagacagggaagttcctagctcaggcacagccgtggcctggaggctcccacccgtggagtcactgcctaccctgccctggggggacaggtgtgcatggaacctgcgtgtccttttccttggagctgctctcagcccagatcttgatggctgtcccccccacacacatgtacgtgtgtataaatgcatatatatacacacatatacacaggcacccgggcatgctgacacctcatgcatacattcacacaagtgtgcacacacttaggagattcccagggcaaaaaggtggcccaggaaggctttttagatggtcccagtgggcaagtgaggatgtgtggtccaagccccagggactcaaatggggcacagggtggggctccctccccgggcagtggaggctcagggccggagggcatttgcctgagaccatggggcaggccaggccctgggcacttcgtgttgaacctgctgtctataccatgacatgcctccctcctagagggccagggaaataggacagcagggttgggagtaggcaggggctgtgctgggaccctgattccaaattctacagataccatgaggcctgagctgacctcagtcagatccttcctcaaacccatcagttctcactggaggtgattctgctcccagggcatgtgtggcagcgcctggagacattgtggctgccacacctcgggggagagggtgttactcacatacgataggtagaggcaaggatgctgcacagaatcctgcaaggcacaggatgccacccagcccctgacagagactcctccgggcctagatgtcagcggggccaacgagaagcctgcccgcagccagtgattttccccgaaagtgggaaagtgagtgatcagggaccaccgccccagttccacgcctgtgagcccagcaaccagtggagaagtggacggggctgtcacagacaccggacctggcaccacccccaccccccgcacccacacactttcctctgactgcaggcagggccattgggcacaggcggaacaaagggagcacggcctcagcccggtggagcactgaggtgctgccatgggcatggccagcctccaacattgccagtggccagggagtaggcgggagtggccaggaagtcaggtggcgatttctgtggcctttggcatcatcatctttggtgtcatgcctttgctgggactgttgtaacaaagcatcacagactggggggcttaaagaacaggagtttattttctcctagtcctggaggcctgaaatccaagatcaaggggtgggcagggttggtttcttctcgggcccctctcctgggcttgtcttctctatgtgtcttcacataatgttccctccatttgagtctgtgtcctgacctcttcttttacaagcaccccagtcctggtggggtaacatggctcatgcctgtaatcccaccactctgggagtttgaggtagaaggaccgcttgagctcaggagtttgagaccagcctgggcaacatgacaagaccttgtttctattaccaaaaaaaaaattttttttttttttttgagatggagtttcgctcttgttgcccaggctggagtgccacagcatggtctcggctcactgcaacctccccctcctgtgttcaggcaattctcctgcctctgcctcccaagtagtggggattataggtgcccgccaccacacccggctaatttttgtatttttagtagagacggggtttcaccatgttggccaaggctggtgatctcgaactcctggcctcaggtgatctgcccgcctcggcctcccaaactgctgggattacaggcgtgagacattgagcctggaccccccaaaaatgtttaagttagcagagcgaggtggtgggtgcatgaggtcccagctacttgggaggctcagatgggaggatgacttgagcctgggctctcaaggctgcagtaagctgtgactgtgccacagcgctccagcctgagcgacagagtgagacatcgtctcaaaaaaaacaaaaaagaatgtgacatatggaaccttttggcttcagtttaccttaaaggccctgccttcagatacggtaacgttctaaggtactgggggttagggcttccacgtgaatttgagtggggaggggagatgttatcataactaggactagaaggtggcctcccaggggcatgggctctgtcccctacatcaacatccaacaatgtgtcagcttcatcatttggagacaaaaacagtagagcttccctgaactttcagcagggacgctaatgagaaggggggactttgtcatagcccacatgtaagagggtccctgccagtccagtgatgtcagggtctaaaaagcagggtcaggggacacaggccttgagccccagggacagggttcttctggggcagatggtagcagtccctgtggctgggagggagggcatctggagaaggcggtgctgcctgggccccgtcaatcgaagggtcatgtggcggcagcagtcagagaatccaggtgaggcgggccccaggtgagcagtggggagtggagtttggctgcagcagaagccaggtggccatgctgtgggctctgacgccccctcaggtcagagcctccttctccttccctgactgtgtcaggcagctgcccttgggttgcatgcagaagcgtggagggaggcctggcccagcctgctccgcaccaaactctgtttcgtggtctggcaagagtaagggtggccctggtgttgccagatgacccccctccccgggattctcagtgactgtgagtgtgtggcttagtatgtgcggagggtcccctgcctccctttaattccatgtggagcctttgtgggggcaggggtttgtccagaggtcaacaagctggccctcctctctcagagggccctgatggaagaatccccctaccacccttccaggctgacttctgtctatttctcctgcagagtgagctggacttggaaaagggcttggagatgagaaaatgggtcctgtcgggaatcctggctagcgaggagacttacctgagccacctggaggcactgctgctggtgaggaggatttagggagctgagcagggcgggatggggcagggtgacagggttggggagcctctttgcccttaagtcccaggtcagctgtcagagcctgggtgcagctcgccatccctggagtggataccagtggaagactgagttgccaaaccaagctggttttaaaattgtatttgttatgtgatttaaaaataaaagtgcatatgtcaggtaaccatgactgtctactgccatacaatgcacctgacggatggcagcccctctcacctgtgctacctcacttgtgccctcttccagcccatgaagcctttgaaagccgctgccaccacctctcagccggtgctgacgagtcagcagatcgagaccatcttcttcaaagtgcctgagctctacgagatccacaaggagttctatgatgggctcttcccccgcgtgcagcagtggagccaccagcagcgggtgggcgacctcttccagaagctggtgagtaacccagggccggtgctgggactacaggcgtgtaccaccacgtccagctaattttttgcatttttagtagagacagggttttgctatgttggccaggctggtctcaaactcctaacctcaagtgatccacctgcctcagcctcccaaagtactgagattacaggcgtgagccgccatgcccagcctttttttttttttttctaatttatatttatttagatagttatttttaaaaagagatggggacttactacgttgtccaggctggagtgcagtggctattcacaggcgcaattccactgctcatcagcacgggagttttgacctccttcctttccaaccttggctgtttcactccttcttaggcaaactgatggttcccgactcctgggaggtcaccatattgatgccaaacttagtgtgtagtgcactacagcccagaactcctgactgaagccatcctccggcctcagccttccgcgtagctggggctataggtgcacgccaccacaccctgtgtgtggctgggactacaggtgcacgccatcacaccctgtgtgcgccatcacaccctgtgtgcaccatcacaccctgtgtgcacacactttccctaaagcaggcttcctccgctgggaaacaagtcctctaggggcaggtgtggccagaggccaggcccccctctaagtgtgaagagcatgtgattccttaaaagcccttcccccagcacttctggactaccgagacacacagctctggcctcgggcctccccttggctggtgctgggggctgagttttctgctctgaggtgtggctttcctgtagggggacccctccctctgccaccctgtgctgcagacccccagactccaggccagagctaaggcttgaggaacacagaaggcacttaatttgttccagttcttgctccctggggctctttcccccatggccagagagcaggaggctgtattttgatacatgctgccccctccatctttgaagcccccccacccccgtttctccgtgtgtgtgtcagcagttttaaacctagtggagggtggtggctcgggctgggctccgcgtcgggctgccccgcagctgctcttgggcagccagggccgctgggtgtggggccgccgggaatggcgggcccgggtgagggcgggcccgggtgagggcgggggcggagaggcgaagaagctgcaggaagggagggtgacgagggggaagcgaaggaaggggaagaggaagggaaaagcgagcgagaggggcaaggcggaagaggaagcagggcggaagggaagcccgggccgcagacggcgaaggaggcagcgggccgggggctgaggcgggagcgaggacacgcccaagagaggaagcagagggaggcggaagcgtggaggaaggggcgagaggcatcatcaaaggagatgaggggagcgtaggggccgggaaagaggcacaaggaagaaagtatgggaaggaggaatggagggtcagggctaggcggcgggagggcgccaggccgggaagagtacaaggacaaggaggtcaggtttgggcctacatcccggggacaggggcggccatggcggcggcagccagggaggaggaggaggaggcggctcgggagtcagccgcctgcccggctgcggggccagcgctctggcgcctgccggaagtgctgctgctgcacatgtgctcctacctcgacatgcgggccctcggccgcctggcccaggtgtaccgctggctgtggcacttcaccaactgcgacctgctccggcgccagatagcctgggcctcgctcaactccggcttcacgcggctcggcaccaacctgatgaccagtgtcccagtgaaggtgtctcagaactggatagtggggtgctgccgagaggggattctgctgaagtggagatgcagtcagatgccctggatgcagctagaggatgatgctttgtacatatcccaggctaatttcatcctggcctaccagttccgtccagatggtgccagcttgaaccgtcagcctctgggagtctgctgggcatgatgaggacgtttgccactttgtgctggccacctcgcatattgtcagtgcaggaggagatgggaagattggccttggtaagattcacagcaccttcgctgccaagtactgggctcatgaacaggaggtgaactgtgtggattgcaaagggggcatcatatcattgtgagtggctccagggacaggacggccaaggtgtggcctttggcctcaggccagctggggtagtgtttatacaccatccagactgaagaccaaatctggtctgttgctatcaggccattactcagctcttttgtgacagggacggcttgttgtgggcacttctcacccctgaaaatctgggacctcaacagtgggcagctgatgacacacttggacagagactttcccccaagggctggggtgctggatgtcatatatgagtcccctttcgcactgctctcctgtggctatgacacctatgttcgctactgggactgccgcaccagtgtccggaaatgtgtcatggagtgggaggagccccacaacagcaccctgtactgcctgcagacagatggcaaccacttgcttgccacaggttcctccttctatagcgttgtacggctgtgggaccggcaccaaagggcctgcccgcacaccttcccgctgacgtcgacccgcctcggcagccctgtgtactgcctgcatctcaccaccaagcatctctatgctgcgctgtcttacaacctccacgtcctggatattcaaaacccgtgaccgtcagggccacccctgcctgtgggccaaggagaccagtgagtcagggacctctcttgcatgaagggtgcagtgatagttcctccccactgccccactgtgctcctgggcctgtgaccccagtgctcaggcaccttgcagtagaggcttctgactcctggagctttgtggcttaccagagatgcagtccctcccaggaacctgttggagaggcaggacctgctgctttagaggagtgcagctgaacctcggccctgcgactctgtttggccagagcaaggatctggcctggagaggcccatcctacaccccttattagagccgtgatagcctacagagtgaggtgaggttctcccgccttcccaggtggtttctttctgccacttcctggaaagaaaggtgaggctgccaatagcccgctagcaccagccagacctcacgcttgaccaacctctcggggccagaggttcattcctggggcactgtggcctggttttgttttgaaaccaagagagggcaaagggaacccagcagttctgagtgagttctagccagccctacctcaggctggctgttgagagattttacaattttcatttttgtaaaaataaagcttgattgttcacagaaaaaaaaagaaaaaaaacctagtggacgtgacttggcctgccgccctcctgagaaatggagaatcgtgttgttggggggaaaaaaacacacatccagagctctttgccagataatattccgaaatcactcagagacttttttaaaactttaatatctgaggaacactggaatttaactttggaaggtttccgctggctgccctggaggccttgagctaccttcatgcgtcagatgatgcagccggaagactcggaggagaggctggcgttgcagtgggaagttgttccccataacgacgagctgagtactcacgtgtgttcaacctgggctgggtgctggggactccccaaggacagataggcccggtgcctgcccttgtccccatgaccagctcagtagggttggcccagcatcgctctgtcaggtttccgggttggacaagtcttaggaccaaaggagcttgcagtgcccttcccagctccggtgcctcttccaagcccaggaactcgtgatccacgtccagtggttcagaaagccagactcagatgcggcttctgccacctcctcctgtggggctgcacgggctgacttccctgctctgggttgtggttctggctgaagttttatcaactcagaatttttatttttctaattatttcaaacttacaggagaactgtaagaatggggcaaagagctctagtatagccttcatccagatacactgatgggaactttttgccacatttgctttatctctttctgtgcacacgcaaacgcacatagacacatacacacacaagcacaagaagttttccccctgaatacttcatttgctaagaacaaggacattcctataactcacagtagaatttgtcaaattcaggaaatttcacattcatgagatactattatttaatatgtagttcatataaacttcccccaagttaacaattacattcttcacagctgttttcattctctgattcaggacccggtttaagatcatgttatgtacttggttgtcccatctctctagtctccttccatctgtaccagttccttagactttgcttgtcttccatgaccttgactttttttttttctttttccttgagatagagtctcactctgtcgcccaatctggagtacagtggtgcagtcttgtctcactgcaacctctgcctcctgggttcaggcgattctcctgcctcagcttccctgagtagctgggactacaggcacgtgccaccatgcccagctaaatttttttgtgtttttagtagagacaaggtttcaccatgttggccaggctggtctcaaactcctgacctcaggtgacccgcccgcctcagcctcccaaagtactgggattataggcatgagccaccgcaccctgcctttttttttttcccttttggagatggagtctcgctctgtcacccaggctggagtgcagtggcgtgatcttagctccttgcaacctctgcctcccaggttcaagcgattctcctgtctcagcctcccgagtggctgggattataggcatgcgccgtcacgcccgtctaatttttgtattttcagtagaaactgggtattgccatgttggccaggttggtcttgaactcctgacctcaggtgatctgcctgcctcggcctcccaaagtgctaggattacaggccgccgtgcccagacaaccttgacattttttgaagggcacaggcccactcgggtttgccagtttcctcaggaatagcctcacgttctgcgtaacagcaccacagcagcgaggctgtgtgcttctcagtgcatcagatccggaggcacatttttgattagtgaaaaatgtggaaaggaattgcttagaactttgcacaagccacctggaagatgtgagctcctggagcaggagggaggagaagtcttgaaaggagtcctcttcccaagacccctgagaccctgctgagctgtcacctcttctgagaggctgtcctggtcctgaccacattctcaaaagcagtctccttgctctcagtccctgtcctgcttataaccatctgccattactttgcttgtgtgtgttcatgcatgtgtttatcaggcactgtcctgttagaacaccagcttcagagggcagcgccgtgtctgaattgtttaccactgcggtgacaaggcctaaagcaggcccttggctgctttgtaccaaggctgggaggcactcagtgacttgcaaaggagggaggagggaaagaaggaagagctctgggcctcatcactgcacggatgaggaagaacctagaattggaggatgcaaggactcctccaggtggtcagcatggcaggggcctggcaggtgtcttccagctgctaccctttcctcgtacactctaagacccttcttgcagcccttgtagggagcagggccagaagatcagacagtgccaagggtgcctggtttatccagcatctgggattgtcatctgtagaaacataaaattcaatataaatgcaaatgcacatggaaataaaatttaggtttgacacaaaacaaacaccaggagccgtgaatgccttgggcttccagcttgcagtcagctacagtgggagtctccagccctgaccagtgcatctcctgggtctgcccttatactccccaggcctaggtttgctgatttttccctcgctgcccataaaggtgttgtggggcccagagatggcagtgtctgctgcactcacacaagttgttgctgaatcgagtgtgtgtctgagctggaggtgcagtgaggagatctattattgccattggtttaataaagaacaaacaacacctctcgccttacagccggtcggtctccccccaccaggtgtgtagcatgacacctgagcaccctcaccaggcccaggatgggcttgtgtctgtgcagtgggaggctctcttctgcaaagacggccggacttggcatttcttatgtgtctgaagggactggacatgcgtggaacaccatgggtgggaaagggggtgacctctgtgtccagggtacactcttgcagccagaatgggaaagtgctgagcacagacacttgtccagattcactgacaacctcaaacttcagctgccgctcatggcaccatttcagcgaatggggtgggaggaataagtagctctggaagggaactgttacctgcctggcgccgtgagtcacttctcagcatgtcattttgggagcgggaagtgtgctgggtgcgtggggaggggagcaggtgggagggagcagcacggaagcgccgaggcctctgcagcctgtgtgccgtctgctgtccctggagtttctgcagagctgtgcacgggagcctgctcttcagaaagatgggggagcagcagcacctgtcccactctctcttccttcctccccctcaggccagccagctgggtgtgtaccgggccttcgtggacaactacggagttgccatggaaatggctgagaagtgctgtcaggccaatgctcagtttgcagaaatctccgaggtaatgccttgatgccgttcagacaggtgcaccgctgactcccacctgtaccctccacctcccgaggagaacagagtgcaccagatcaagatctggtcgtgaaccccagctgtttccagattctgttgggttcgttgcgtcagccctgtgctggggatgctgttgtgcgcagaccgaaggagcagcccacagggcgtcctgcctccccgggggcgagggcctgattctgggggttgccgagttccggggacactctttgcactgtctgtctgcagtgaggggtgtctgtagttctgcctgtgagcagctctctccacaagagtcctgaggctgactttgtacctggcactggaggcgaggccggaggtggcccactcttccttttctagcctgccagagaccttgagagcattgaggaagcattgaggggctagcgccgtggggcgagggctcatggcacctgtgctctgtggacccatgtggggagcaaagcgacaggttggagctgcactaacccaggccccaggtctgagaggctgctgactccctgcctgcatttagccccaggaagctgaaacctcaaaccatgtggtgttagcgcccagggcctcgaaagagtcattcagaaacagagaccatgaatgggccattcagaaggctggtggcccagccagaaccagaacccagccacacccctgggtctgcactccagactggggttctttctgcccttctccagcctgtgtctgcctggtggtcactctgcgacattttcctctttggaggcccttgcctcttcatgagccccccatctcgctgtagctttgccttctgacttggctttcccccacccagcaagggttctgagcagaaagccctccgtgtgagaaccgcagggttagaaagaggcatgggcactagaaatagggagtgaatgcggtcacccttgctgggacaccctcagctgtcacccctgggctttgttgctgaggctttgtgccgtcttattgtttatcaccggatggagcatcacgggcttcgctctgatgtctccagtggtgacagtacctgccgctctgttcttccagagtctgtggggcaccctgctccgccaggtgctgctggtaacaggctctgcatgtatccggggctccagctccctccccactgccagcctccctctggaccattcaatctgttctcttttcctttttcattaaatgagcaaccctcctcccccacagctggaatggtggcatcgaatttcaagtgaccttgacaaatcagggacctgatcttttaagaacaggttacagttaagcgggcaagttcaagtccacccagacaggtttctgcagaggagggaggaaacaccatgggacgccacctggggatcacgtggtgccaccaaccatgcaccagtggattctgagccatggttgagatgcagggagtgggatggggctcaggaccagctgcaaaccgacccaccgtgaaagtttgtggcacctgcaccatcagggcgacatgcactttggttctctgtgtttcaaaaaagacccagaggaattggagccacccaaagaaagcagagtcaaacgcaaggaagagaaagcagcaagccctgcagaggtgttggggggtcagtgctcaggcgtgggagttcgaagatcaccctcaagtacaggaaggagtggagtagtgtccgtcttctcctgggacagtcctgagagatgggcagcatccagttagatctggttccatggaacaccagctctccagacggtaggaataggaattacatgaaaagggctttgggagtcaggccagtttgggaaatgcagggttaaaccaaactcacaagttttcttgaggcaggttttcctggagctcctagataactcccaagcatcacactgtccacggacacgtgggccgcctcccaggctcttgtgagcccagcacctggtttttgcagtcttttgtttggctctcccacccccttacaccctttgggaactgctgagtcagatatacagaagaacagtcactgcgagggctgttaaactctcaggaaaggtaccaaagtgcatggcagcgtttggccccagtgagctggaaaacactttcgtctggtcttgagatgtttcctgcagcacaagaggttggcagagcaacctcagaacctcttctgtctctgtttatgcttttgttcagaagcttagtaccaggaattaatctcagctccttcccagaggattttaggcacacagggatcttttattctgcacttctccagtgatgctttcaacacaattgtatcaaaacagcctaggctattcacttacaagccctgcttttgccctgggaatcttagcacctcattttttagtaagtacacttgcagatccggagagggcaggtggaggtataatccagtgtcagtctgcagtggtgggcctgccctggccgtctccaaagatgggtgctcttcggaactggcagccccctgcatgctgtctaattgccccaagaaaacagtgacgtgtgtttaggagcatgctcctgttggcctccatttacaggatcctctgtgtcagaggatctcagccaggcgtgattttgttcacaagggacacttggcaatgcctggagacattttggttgtcaaaacagcaggaaggcagacgtgctcctgtacctataggtagaggccagggcagctgctcagcaccctaaggtgcccaggacagctgctcagagaatctgtagcccaaaatgtcaacagtgacctggctgagaagccctgtcccaggtggaccgcagcatccagggcatcctgcgtgctcggcttgctcgtgggtccctgcacaccctgtgacttcattatcagctcagaatgcacctggggtttgttgtagtgagggaaagctgaaattgttgccaaagggggaactgtctgcatcatcaaagctgcttctgtcatctgtgtgaacatgcgcttttctctctgcagaacctgagagccagaagcaacaaagatgccaaggatccaacgaccaagaactctctggaaagtgagttctgcatgctgaggtctctgtgtgccctcgtcagggaggctgctgctggcagagggggcgttgtggaaaagcagacacagtgcccacttgggtcatcccttggtgccttccctgttctctcttcagatagagtgggcacgaggaaagaacagctcagggagggcagggaaggataccatcaggaccagtttgccaccaacattagcaacaaggtgctgcttaaattgacttaaatgttatcctgttgaccccagtggcctcataaggaggattttttttttttgaggcggagttttggctcactgcaacctccacttcccgggttcaagtgatcctcctgcctcagcctcccgagtagctgggattacaggcacacaccaccacagccagctaatttttgtatttttaatagagatggggtttccctccgtattggtcaggcttgtctgaactcctgacctaaagtgccttggcctcccaaagtgctgggattacaggtgtgagctaccgcacctggcagtaacaaggattttattttctgtttttgccaatgacaagtttggtcataaagtaatctgtgcagagcacaggctttaagtggctgggcaggaattgagtccagagttgctgggaaagtgctgtcaggaattgtcagtcacttcttattttcagttgttagggtgttgtgaatagttacacttgcaaagaacagcagcccccggagctttgtcctccaagcctcagtttccctatctgcaaaatgaaaatagcgatgagtgccttatgctggttgtgggagtcttgtgaagaacatacttggcatgtctcagaacacacctgagcgtctgtgcctgggacgggccacactcactgtcatcatggagaagcacgggtggctgaggctggccagggctcccaccatgccagggagttgctcccactgcagtggggctcatgtgcctctggagtccgggtgtcctcgggcaggtcgccagagaacctgtcaaaccaagagttgtattggcatctgagtaggtttctgcttgtctcagagtcaggtgtctgaaatgtcctgggatcgatggtaagagcagctaagaggtctgctcagcttaccctctgggctggggagcaggtctccctccagaattggggcccaccccagcccgtccttgccagggtgggttccctgacctcaggctagaggagcagcagtgctgagccttttcagctgttgccaccgagccagccatgcaggctcgggtctgacagccgctctggactctgcatgcagtgaatgtcctggacttaaagtgttcctgttgggtgctctagccttgcccttgtcactgcgcagaggggagatggggcctgtggaggctggggcagccccctccccactcacccttgcaccgagggtggtcaggcagctggtgtgcttctccatgtgcaacctctctcacctcccctctctctccacagctctgctctacaagcctgtggaccgtgtgacgaggagcacgctggtcctccatgtaagtcacagcgcccctctggaccgggaccaaaactgccccctcgggcacacacagcaacaatgttctgagacctttttttagttgtcatagctgcagccaagggggtgctactggcatctaatgggtagaggcctggggtggtgttggacattctgtagggaaaggacagctctctcttgtccctccacaaagagttactccacgcaaaatgtccacagtgctgaggttgagaaaccctgccctagatccttacagaggagtccttcttggccatgtgcatgcagcgtgagtttgctggaacacatgtaggacctgcttccaggatggtgctcacacaagctctgtccacaaagctggggcccaagtgagagagactgtggtgacactgagggagccggcgctctgggctccgtccacactttgtgtctgcactttgcacacagtggcaggtgccagtgctcctctgtgtctaactcaagtctttcttcctggggcaggacttgctgaagcacactcctgccagccaccctgaccaccccttgctgcaggacgccctccgcatctcacagaacttcctgtccagcatcaatgaggagatcacaccccgacggcagtccatgacggtgaagaagggagaggtgagtgtggcaggggatggcttgggtccacccatcctgctgagctgggggcatgcagggcccctcgatctgaggtctggagcccttcctggtcctcagcagaccttgccttctgggattggtgagattggccgcacactcagtcctgtgtggaaggtgtctgggtgcagtctcaggggtgaccctgcaagcaccatgccctccaggtggcagccatcaccatgcctcactcagccacctctttccttttctgtcattgtgggttgtgtccagggacccctttttttttatcccccacagtcttgccagctcaggctccccagccaaggagacttgtgcaaaggaggtgagtaggaggatggcattttgtctgcctggaatcctcctacttccccctgagtgctttcattaaaaaacagttaacatcgggtttaaggattagaaagtggggttcgtggtttgtgtctgtgacgtgagactggttgaagcacttcacgtcttcctccgggaagactctccttccccttcccccccgtcactgatgtactctgtgtgcacatcatcgatgagcaggcatggcctgtgcctgtgccgctctgagccttcctaggtgtggcctggcacataatgaggcagatgcattcccaggcaggtagcagctactgagaacagccaaggcgtgtaagctggggagccagtgtccagggggaacagcttttgtcagaagcagcactgaggcgaggggagctgacccccggcctcaggggtctcatgcagggacagaagctgtctggcccaggcaggacacaggctgggcgtgaacctgactgtagttgcctcagaaccacctcatggctgggtgcggtggctcacgcctgtaatcctagcactttgggaggcctaggcgggtggatcaggaggtcaagaattcgagaccagcctggccaacatggtgaaaccccgtctctactaaaaatacaaaaattaactgggcacggtggtgggtgcctgtaatcccagctactcgggaggctgaggcaggtgaatcgcttgaacccaggaggcggagtttgcagtgagccgagatctcaccactgcactccagcctgggtgacagagtgaaactccatctcaaaaaaaaaaaaaaaaaaaaaaaagagaaccacctccttctctttcttctggttcatgggccaggtggtcggcactgtaccaaggacacgggccctgtcctcagggcccccagggtggacctgcccaacacatggggcttgctttcctcctcctgccctgggccaccaggcaggcagctgtcagccccatctgccacacaccactttgggaatggtaccctgagtgtccagagtctaatccgagttgacctttagtgagggacttggtcaggtttctcctggtgggcctggcccaggaagggcatggaggaggagggagctgtcccttccattccgctctccggcttgtccaagccctggagctgggcagactcagagtcccatgccagcatcgtgaggaccgacccactgggtggcctagagcttctcccaactgggcccattccttgtctttgcagcagggtgggaacatggccccacctcatcgggcacctgggctgtcaaatgggcatgatttagtggcagtcctcgccatccgtgttggctccttggcagtctctgagcgcattgaaggcggaagtgggtccccggcaccttccagtggaggcgttgagcagtgcaagtgttccccagctgctcatcccatggctgggacctgggagtggtgggggatcagatcttgcttcttggagcaacaaccgggccctgcccttggttctcttccctggctcagggccccagaaggagagcaaacctgtgacaaacctgtgggcagtccacacagatctaagtggatgttggatttgcttctcctaagcctccacgtgctgggtgggttcctgccaggttcgccctaccctcctgagatgcctgctctttctcttctaccgactattcttttatgagcgctctgacctcctgggaagtgagtgtgggcgtcctttttcccatggcttctcctgtgcctagtctgctccctgcaactgcagctgccatttagcattcctagagacaaggaagggccttctcagtgctcggatcattggaatccactgctttggggaattaaggaaaacgcgatgttgtctagaagttgacacctaggccctcgttcctgcatccgtccccatgggggccaacttccacgcttacccatggtcatgtctcggggccaccaaggaggaagtgtaatttaagaagggctgggtgcggctgggcgcggtggctcacacctgtaatcctagtactttgggaggccgaggcaggcggatcaccaggtcagaagtttgagaccatcctggctaacacgataaaaccccatctctactaaaaatacaaaaaattagctgggcgtggtggtgggcacctgtagtcccagctactcaggaggctgaggcaggagaatctcgtgaacctgggaggcggaggttgcagtgagccgagattgtgccactgcactccagtctgggcaacagagcgagattctgtctcaaaaaaaagaaaaaaaaaaaaaaagggctggttgcttcacaaaggcaggggcctggatctgcatcctccccaggacctcgccctggtggaggggcacttgctcattgaggaggggtcacctgggtgccttagctgcaaagcaaggtggaggactaatgactctagaaaagtcaccgtgagtctgaccagcaccccttcactcagagctttctatccgaggcacgttaagggaggtggcttgatggtggctaaggcaggatgatagatgcctgtgctttgcccctgcccctgccattcctggggcagatgctgctgatcagttgggcactccaagcctggacatccacctcggtatcccctggcactgcccaacgggtttgcagtccttgatgcagaaagaaagatgccagatgggcgaagccccgtcagggtccgctctccctcactgctaccagtgtactgatttggggacacccttttgcttccctgggtgtccgtgctctctgagggcaatgatgcagggtccgtggcccctccactgggtgttgagactgaaaaggtttcacagcctgcgagggactttatgaaagtgaggggtggtggcctgcccgcatgctgccatctgtgtcggaggtgacgggcgagctcccctgacgacactagccaggaaaggggggcagaagctccaggctacttcctcttagaatttgcagccaggggcagggcctgaacttttctcagttctgcccatctcttagtttggtacatgacatggagtgtcaagttcccaaagggagaaagggactgtgcctctgcattctcatgacagttctgtggggtcagaggtgatctcccttttacagatgaggaaactgcgactcagagaggttgagtgtcttgcccagtcacacagccactaagtagctaagccaggatgcgagtgaggccatgggcccctggccgcctgtgtgcccctcgggtgtgttactctttggttcccttcctcctctgtgagccgataggacgtttccacccctcctcttgttcctgcactacctggaggtaggaaagaggaagagatgtcccttttagctccgcacactaccccatcccctgctgctgctgctgctgctgggagtgtgtcaaggggttggggctgtttctgtcttccctggcatttgatgtcaagaggaaagctgcttctgttggcctgggtgtttcgaggttctcctgcagtcactactgggcctcctgggaggtggcccattgctacctgctgagcctgggcaagtctggcatcgaggagaggcccaggtatgagccctctgcagggtcagccaccccagccccagacccccactgtggctcctataatctcattgcccttttcagccacatcccatggctccagggctgtgctctttggggaacagtgactttgggctgcattccaggtagctccctgatgctgaacggtggccggcaggtgctccagcttcctggcatcctggcccaagcacacctgggggccgtgagccacaggtgctgcccaagagaatgccctccttagccttcccaaaatgacaggatcaaaggatcccgcaggcacagtttctttccaggcctgggttctgagggctggtgggtggcgctcatttgtttaggtgaattaacttcacagttagataaccaatccccactgctgggtgacttcccacgtggttgcctctctgtctactcggagccttggcaccacgtgctgctcagcaccccctccgcctgggctcggaagcatagcggacgatccagtttggatgttctgtttcccaagagccagccaggcattgacctccaatacccgttctctgcctgggattgcagaggcccctcttttaggaagaacacagacagcagtccaaacaggagctgcaggaaggccctggaggagggaagtaccaccagtgcaggcttgaggctgagagatggtgaggctcgggcagaggagaaccaaggtctttcagttgatgattaaagagttggagaacaggctgggcatggtggctcacacctgtaatcccagcactttgggaggccgaggcgggtggatcacttgaggttaggactttgagaccagcctggccaacatggtgaaaccccgtctccactaaaaatgcaaaaattagccaggcatggtggcaggtgcctataatcccagctactccggaggcggaggcaggagaattgcttgaacctgggaggcggaggtggccatgagctgagatcacgccattgcactctgcactccagcctgggcaacagagtgaaattccgtctcaaaaaaaaagagttggaaaacagttggagaagccagaccctgttggcaaagtttgcaaggggtgctacggagagggaggtgcccaccccaggggtgaagacaggatgggtggggttctcagctccactggacaccaaacagaagctgtaagtgcaaggctagtgcccatgtcgagggctgggcctttctgggcccttcataaacattggcaaacaaagcttgggttctcggcttgtctgggccaagttctaattccttccaggagcgtgggcacgttgcttacctcttagctgtttcttctccaggaagtggtggagctggagcctgctgcatgggagggttctgtggagtgagatgagatgttttacgtcatgctcttttcacaccttcttggcacccagaaagagctcagcaaacattagctgctaccagccaccctgactgtggctgtcagccagcattgttcttcccaggccctgccctaccctcctcctggcatagtgtctctcagggcataggaaactttctcggccagattggccatgggaggctttcttggggaccagagagtctgcagggagggcaagtcaagagcaggtgagagggagggaagggcgagcaggacccttgacctcattctcggctgcagtgtatattggcctgcctggtgaccctccttgctcctggtcccactgccaaacctctggagtctgccacatccctgcatagacagggccactgacaggcagtggcagccagttcagtggcactcagccaggtctccaggggtgtgcgctttgctctgggggcagggtagcgggggctgaggccactggctgcctccagggcccccccaccagccagcagctggaagctccaccttggtcttcacttgggccgtcttccttctccacttcctcagctgctatgtgggcttctttggcaacttttccttgtctcaccagtcaaggccctgctgatttgttgatgatcagactgtagttcgtgtacctggggaagttttccagcatctccatggagccatggtctctgattcctggagcatgtcgtagtcggttcaggctgctgtaacaaagtatcatctgctgagaggctcacacacaggcctttacctctcacagtggtggaggctggagatccggcagggtgccagcagggtcaggttctgatgagggcagtgagaagcacggccaccctcccactgtaccctcacatggccttcctgggagtggacatggagagagaaaaggacctctctttttttccttcttatgaggacactcatcccatcacatggattccaccgcatgacctcatctacacctactcacctcgcaaaggccccacctccagataccagcccattggagttagggcctcagcataaattctgagggggacagaaactttcagccctaacagtatgcttcttccagactggccttcctgggaaggccctggataggctgtgcctggggttgggggtgatgttgcactggcaacagctggaggaggcagctggcctgggggaagtccccttagcaaggaggtgcccctcctcactcccaccagcctgatgcgaccccctcctcagaagacagggcacataatgtgacctcacagggcctcagtttccttgtgtgtagaaatcagggttatggtgcctgccttgtagagtcctggtgaggagtgagtggtgtgattcatgggaagctgtgactgtcacattcccacctgcagaggacatggcgaagggtgacagccccgtgtgaggccctgcaggtcgcagtttcatttaatcctcagaacataccaccagactggtctttctcaccccatcatgtttaaggaaacagaggctccaagaaatggaggagcatagccagcatcatcgtcacagagaaggagaagggtgggctcgggacagtgaagatgcaggctgtcctggccacccttgctttctgcgggctcctgtggggatgatgattttagttattcaagaagacaggtggcgtttcttccaactggtgtttcccacctgggatgtgggggggctccccaaagggagtgttgtcctgccaactggggcctgctgtcccactgccctgccccgctctgaagcacacacagggacccatgcccacacggggttacttgcaccaggacacacacaggcctgacacgcacaggacatgcccttgcatgggaacacacacacagaaacatggagatgcacacagtgagacacacgggcacacacctacccaggccacaggcctgtgtggggttccacgcacgagggcacgctcaggcactcacactcacacaagaatgaacacacctggaaacatggagacacacagggacacacagacgcagagcacataggatcttcccctgtgcccttttcatacacagactcccatggccccggggagccaaagtgtggtaccgtccctgtcccggggccactgaggccctggccctctctgtcccacagctccagctgggactgtttgccctagttgagatgctgagccttggggacagtggtttccagccacgtggccttatgccggctttgggatgcagtcaggattgtgaccccggcccacccttgccgtgtgccctggaggacgactcgggtgggctatgcaggaagcctgtgctgatctcaaggccaactgtcctgtactccaggccggggaccaggctgctgagcgcttccgagagggacatctcctgggcagggagtgacataggccacgccatgtgggcctcccagccatgtgctggtgctgtgtgggctgggagggcaggcaggggccgagtgacggggactgcagagcggggcctgagatgctgtgacatgctgggctgcctgtggctttcgggcttctctcagatgagagttgcacaggtgggtggggggttggggagtctgtggcagcatcaaaagagtagcccagaaaccgccgagtccactgttcgagcctcccgggcctgcagcccgcaccccagaggggccacttcctccccacagtcaggcctgtgtgtcctctcaacgtggcaagccggcatgtgggtgctacaggtccccagtgtgacactcagtagccttgctgaaggccgagggtgccccttaggtgggttgtgggcagcctctgctggagagggagctgcgtttcttgaccgcaggcagagtgggctgggtctgcagtttctgagctgagcatggggtgccctctgctggtgatggcgagaagctcactgcctttgtatggagaaggctgccatccagccccgccactgccccagaaggaaggcgcctgagacccctcctccttggccgggaggccctttgctgtgtccctgccaagaggacctactgcagtccttcccgaaggacctcagtgtcctgggaccctacccagatctggtccccactgcagacccagcagtttgggttacccggcttcagcgctccagctctacatgatgtttctccaggtgcacatgctgtttcttgcttcccgtgggtgccgtcaccaggcagccgtctgccctcggcaggcggggtgtgggtgagtgccgatgagtcatggccttggcacgccggcagccttcctacccttccacttatgggcaccagcagcccctgcgtaattcattggttccccttcgcaagagccggctgcctgtcgtgagccaagctgcttatgatggtgacatgaagcctccacctctgagagtgtcggaggactggcccaggctgttcttgcaaatggggagctctgttgcctccggccccagaatgggggaaaagttcagagagaccgaggctccccgagaagaacctcaggctgcaggtgacagcagggcaaggtgcctggtctggccccaggaccagcctggctccctgagagcacaaggcctcatcacttctcgagatgaggacaggtgcaccgcctgcggggagacactgggttttcacactctctgttgtatgtgcctcccctgccaacccttctgactctcagtgcagggcgggcgtcgtcctccctgtgagccttccctgagaccaggtgggctgggtgcccactaaacacttggcctctctgccacgaggttgtggactcctgagggtagaggcctgtgaatgttacccctctctttctgcgctgcctgggacagagggtggacctccctgaagctctgttttctcattaaggacctgcctacagcctgttgtggggattgggtcaaataattcaggcgatgtgctcgtgcagtgcgctggtcccagcgtggggaaggcttgctgcgacagcctctcctcctgtccctgtaccctcggcacagcgcccaaccctgtgaggtaccaggcaggggtgacttacctagacatgcccattcagcagccccttgagcaagaaggaccgacccttgcctttcagatgcagaccaagatgcagaaaggcacccttctcaggccgcaggtgtccaggcaggtgtcagaggtgcagcccgtgcacaccggggaccctatccatcctgtctagttgggaggactaggagttccacatgtgggaccctcagttcctgctgccttcagaaccaggcccaacccttgctgtgacctcgagggctgccacttttcagagtgcactgggcctgtctccacccatagaccatactgccacatctgtacctcgggcaccaatctctccccaccacaggggcctgtgcctgagatggtccctctacagaaatacctgctcctggcatggctggcttcttgccaattctggatctccagctgccaccccagagaggcactggcttccctgtttaaagagggtccccccatcacccatcttcacagcagactgtttgcttggctgtgtgccccttcagacccacacccattacctccccctctcccccatcctcccaccctcttccaaaggctgaacacacaggagggattgggaaatttgttgaacaaagaagttacacataagccctgatgtgttagcaggacagtgagatgaacaaaacgttctggaaagtgggtgtgagggtcagatgtggagggagtgaaatcttcccagggagagaatgtctctgggtcaacctgctcctgctgggctgggagggccgaacaccccccacccatcaccccaggctggccctgaccccagccttccctgtgcctgcagcaccggcagctgctgaaggacagcttcatggtggagctggtggagggggcccgcaagctgcgccacgtcttcctgttcaccgacctgcttctctgcaccaagctcaagaagcagagcggagggtgagtgacgatgtggcccctgtcccagcagtgaccccaccctgactctccaggtcatggagggtcttgtcatggcggaggtcagtggtgatgtagctcgttacattccgtttctacttgggcacaatgccaggctccaggttaaagattgtcactagcaatctggagacgtcatggggcatcagggtgaccagctttgactcctgtagtgaggggtaaacccgaccgtggcttccggcactattgcagaaaggtcacctcaggacccatccgggaagcgtgagatcaggggctgcaggcagtgctgggtggtggctgctccttgtctccccgagcctggtggtggctttccgagttatcctcggcataggcgtgcacacactcccctcctccctcctccctgggttcacccaggttgcaccaggttggaatggagcaaagagggccacactgggaaggaccagcacggggctctttcctgcatcctgccgttgccctgctgagtgggtttaatcagtcaactcagaggagagccttagttcccccatctgtcaggcgaggggatgacgccagctagatctgtagtccctcaaactttacggccctgggggtggatttcagtcctgtcctgtcattgtgcagccttgatgtgctcccacatgagccttcaaccttagagccagctcaggacaaggtggatctagactcctgagatgcctggggcctgcggtcacatgttcagagtgtctgttcccaggaatcctggcacctgccagtggcctcatcccagtctgtcccatggaacacgtgctgggttttaggtcaggtaaaccatgtatggccgagaacactggctcttgggctcttgacagcagtgacatcagccatagaaggcagtcggtgcatgtgaacgttcttctctccccatccccagcaaaacgcagcagtatgactgcaaatggtacattccgctcacggatctcagcttccagatggtggatgaactggaggcagtgcccaacatccccctggtgcccgatgaggagctggacgctttgaagatcaagatctcccagatcaagaatgacatccagagagagaaggtgcacaccaggggagcaagggccgggtttggtgtggtcagagtggcagcagtccccgcacacggccagtgggtgctttctccgtcaggcctctgggccccaggtctggtctctgggacccctgtaagctctcagctcttggagggctgggcatctgggcacaactaggtgtccagttgttctgagaacccccagctaaatggggagcaccataccagagcggctgccaacccaaccctccagaaaaatgaagggaactggtcgtggtctctacagtgcgcctttcacgggatacttcttagacctggtggactgcctcatgcttagttgtctgacctgtgaccaggggtccctcacgagagaaacttgtttaaactgtgtccagtttatgcccacctgaccattgctgtggcactgggagcctgattttgtgttttcactggcatccccggggaaaacttaacctaggcaaacacctcctagtttttcggaaacacagcaccacaataggaaacaagttcagagattttacctacaggttttggacaaggaggtgccatgagtagggagggcagtcttctgtccctgggtcatgcaaggcagaaatgaagagttagcgcatgacagctagcagtatttataagggaacagggtgtgatcactttaagttcacaggcaaatgcctggatggtccttttaaggaagcagcaggaatgcgggagctcagtcagccgggcgggagagaggcttccgggttctcacctctggccacaggcttgagctgttcaagtgtgtggtctcctgatacccaggctgcgtcctttgccgtgtggttccattacatgggtgaagtactgagtcaccagagagaaagtcacagccagacagtggagggcttggagtagtccaggatgcagggttgggggaggtgctggctgtcccccatacaagctaccctgatggggcccaggcccaggtggcagtgccacccctctaggtgttcaggactacctgcccttggttttttccagagatgtttgaagactgtaaaaatggtgaggacaagcccctcaatcaaaggttagccaggccagaggaggcgggtggcatcaaggttaggcctgggtccaggtatgcccaggtagggtggacgcagcaggacaggaggtcctcagcccttgcccagctgcccagcctgctgtacccaaacccagcacacttaggaacacagggagcttcaagactggggtgaacattctattgtcatccttgtgggactgtgacctccagggtagggtgtccccacacagagtgggagccagtgctcagggcagctgagccctattgactgttactgttgcattctccatgttcagctctttgggggatgggatggggtggggccctacctggtgacaggcagcacagttttctcctccccagggatagtggcttctagagtgaaacccatggctcagcataggaagggccttcccatccaggttctgttgacggtcgtctggtcttctgctggcatctccacaaacatgcccaggggcccgatgctgaaacctagttggattaggaagagggtgagggaccctgtaggtcacagcagcctcctagacattgtctgaatttgggaaaatgaaaggcagggatgttggtaaaagtttcttctctccgcccttgtgagaggaaagacttaattcctccaaaaaaggtttactgagcatgtcctgcagcttatgccatgccttgaccctgtaaaaaagctgtttctgtcctccagaggccaccagcaactgcggtctggggccctggtctgtgctgagtggagagatgggattcttgccctctgcaggctgaatgcagctggtggtggggatggatggaatgggagtgggttgtgtggagcgctggaatgggaaggtgaggctgtggcatctccccacagagggcgaacaagggcagcaaggctacggagaggctgaagaagaagctgtcggagcaggagtcactgctgctgcttatgtctcccagcatggccttcagggtgcacagccgcaacggcaaggtgagcgcctgctgttccggcccctcctgctctcctggcctgggatgggctcctggttgcctaatggcagtgcgttttcacttggatgcgccccactctgagagaggcatgtccggcatggtgcatgcaagcacgcacattcctttgtctggggctttgggctgtagcccccaggttgagtggcagctggctcagctcccacagctgggagtggacagggtctccagggagggtatagggcaggggagcctagcaggtttgtgcagatctggcccttggtacagggatgctgtcctggggccttgagggccagagacacaccttctgtcctgagtctggctcctgctgccatctgtaacctgggcctctccctcctgtcaatacatgtctgtcaatgtccagaatggcttgttttctagcctgaccaggagaggcagctggtgggctctgcagaagcctcacctctgggctagtgtggggcttgtgaattgaatgcaggaggtcaggtctggatcaacgttcacctctgcagatcccacctggttacctccatgtccctaagctgtgcccctctgccagcatcacaccctgacccatgtagttcgggtgagagatggtgtgccagaggtgctgtggcacccagctggcaggaagggtagggagtgccggaagcgacatgccaggccgtgagcacacctggccactgggctccagccggctggagatacgagttgtgtgctctaaggtgccccgggcctaccaggcatttgcgtagccagggcggagataactgggtgtgttcttcttgcccaccctagagttacacgttcctgatctcctctgactatgagcgtgcagagtggagggagaacatccgggagcagcagaagaagtgtgagtatcctctgtcctgagaggggctgggcttcaaaccattagggccaggctggcagctcctgtggttttaaaccttcttttttatttcgaggggttttatccaagtgaagtgttgcatggagggctaatttagaaaagaagttggcgacagccatcccgataggcccccagccctcttgttcccctgccagcctatcctgcccccatcacctgggcactcatttccccactgccctgtgatcccctgtgaatcccccttccccaggccctttccagattccacacctgcccctacacacacccctgccatctccccctagtctgctgcccatacaccgcacccccggcctgccccctagtcctttctgggaccctgccaccaccccattttcttggcctcccccatttctcctcatctactccccgccccctgggccttccctgccccagcaggtgctgatgctaaaggggcctttggctgggcccacttgggcattcacactgtgctggccccactgccctgttcatatggccggggttgcccgctctcagctcaggggcgctccctcctgtctggggcagccccttccttctctgggcacttccctctgtcagggcgctccttccttcgggtcctgcctggcagtgtcggtggggaaggcagacccggttccctccttggaggtttgggattcaccctgagctggggctctgcatgcctctggcctggcctgacctcccgcgccctcaggctcatcattctcacctatgcagagccacctctcggcccccaatgccaccgtggcctgggggatcaaggatctccgggcagccctgccagtgcttgtgtcccagggtttcctgtcataacataggagccccagccatttccagagtggcagcctctgttccctgttcagcattatgcccagaaataagccccttttcctcacctggtggagaaacgggggcctgtgttagcagaggacgggcagagccatgctgctgtctgtatggggagacctcacagggaggtgctcccagtccagccactcattctcagacctgccttgtggctgtgcttaggtagcgtgggatgtgtgtgtttgtaagtctcatgctaagactcctccaggcctgggctctccagggccacacctcactctgccgccagaccagcactgcacttgagagccaagtgccctctcctgagcccccaagccctggcaccagttcttgccgtgccccttccccagggtgtgtggtggaggtccagtgggaggggccagagggccaaggagcagattgaccaattggtgcacctcttttccaacctcccaggtttcagaagcttctccctgacatccgtggagctgcagatgctgaccaactcgtgtgtgaaactccagactgtccacagcattccgctgaccatcaataaggaaggtgggcccccccgtttccgtgtacagggcacctgcagggagggcaggcagctagcctgaaggctgatccccccttcctgttagcacttttgatgggactagtggactttggttcagaaggaagagctatgcttgttagggcctcttgtctcctcccaggagtggacaaggtgggttaggagcagtttctccctgagtggctgctgctgggtggttgaggagatgcacggcttctgttcctagtcacaaggctgcagcagacgctcctcagatgctctgtgccttggatctggccccactcccgtcctcccagccctcctctcctccagctacctgccagccggcacttttggtcaagctgttttgcattcactgttgcacatatgctcagtcacacacacagcatacgctatgcacatgtgtccacacacaccccacccacatcccacatcaccccgaccccctctgctgtccttggaaccttattacacttcgagtcactggtttgcctgtattgtgaaaccagctggatcctgagatccccaagacagaaatcatgatgagtatgtttttggcccatgacactggcttaccttgtgccaggcagatggcagccacacagtgtccaccggatggttgattttgaagcagagttagcttgtcacctgcctccctttcccgggacaacagaagctgacctctttgatctcttgcgcagatgatgagtctccggggctctatgggtttctgaatgtcatcgtccactcagccactggatttaagcagagttcaagtaagtactggtttggggaggagggttgcagcggccgagccagggtctccacccaggaaggactcatcgggcagggtgtggggaaacagggaggttgttcagatgaccacgggacacctttgaccctggccgctgtggagtgtttgtgctggttgatgccttctgggtgtggaattgtttttcccggagtggcctctgccctctcccctagcctgtctcagatcctgggagctggtgagctgccccctgcaggtggatcgagtaattgcaggggtttggcaaggactttgacagacatccccaggggtgcccgggagtgtggggtccaagccaggagggctgtcagcagtgcaccttcaccccacagcagagcagatttggctgctctgtcgagctggatggatactactttttttttcctttccctctaagtgggggtctcccccagctactggagctgtcagaacagtgaaggctggtaacacatgagttgcactgtgtaagtttctcgaggccgggcgcagtggctcatgcctgtaatcccagcactttgggaggctgaggcaggtggatcgcttgagctcaggagttggagaccagcctgaccaacatggtgaaaccctgtgtctactaaaaatacaaagattagccgggctaggcagtgggcacctgtaatcacaactgcttgggaggctgagggaagagaatcgcttgaacccaggaggcggaggttgcagtgagccgagcttgtgccactgcattccagcctgggcgacagagcaagactccgcctcaaaaaaaaaaaaaaaaagttcctagaaacagcaaaatgtggagacagaaagcttaccagggattgttggggaatggggttgggagagaggactaactgcagatgaacccaagggggactttttaggtgagagcagtgtcgtgaaaagactgtggtgctgtttgcgctcacatttacatttcctaaaattctttaaaccctacacttggaatggatgaattacatgacatgcagattgcaccttcataacataatctttctcctgggcccctgtctctggctgcctcataaacgctggtgtttccctcgtgggcctccctgcatccctgcatctcctcccgggtcctgtctgtgagcaatacagcgtgacaccctacgctgccccgtggtcccgggcttgtctctccttgcctccctgttacctttctttctatctcttccttgccccgtgcactcaaccttgcatccccaaaccaaacctattattcatggaccccaaacttgttcctcttatgtcctgtccctttgaggggcaccaccatccacccgcatggccaagccagaaaccgtggtctgctctccctccgttaaatgccattctccatcagtgaggcttcttagtcatctctggctgcctggccaggccctggctgtggcctcctccctggtctttgtagctctggatatccctgcagaaagggtccccactaccaggcctctccatccccagtctcaggtagtttttctaaaatgcaaaccccaccctgcaacttaccgcccacagcccagcccactcttctccaggcctcgcctccctcccttccccctgcaccccacgacttctccagcactgagctgcttcctgtgccccacagtggcctggagtcccctttgccttaactctttgccccatagtacagcggggtctgctctgattgtaggggcttcccacatcccccaggatggctgccctctgctgtggcatcactgtgtaacaatggcgtgtacacctctctgtccccaccagtgcagggcccttctcatcgtaggggctttagctggggtttgtggatcgactgagtgaacgaatgttgtgggaagtcccgtttcccagccgcacccagggaaattccacagagcgggcaggggcatcgcatgaggtgctggtgttcacgccagaccacaattaggtgtttaatttttaaaaagaaagttacaaccttttttttttatttttattttttctgattctgcaaataacacctgctcttacagaccatgtgggtgatgtggaaaagacctgtgaccttctccatgtccacttctccccacagatctgtactgcaccctggaggtggattcctttgggtattttgtgaataaagcaaagacgcgcgtctacagggacacagctgagccaaactggaacgaggtgaggaactgattccacaagggcccagcctgccaggtggggcacaggatattttccactggagataatctaaaccttcaggggctccctgagggcttcccccgaaggcagtgctgctgaattccaggaatctcctggggggccagtaggtgacgtgtccaagagattttatctccttgttcctgaaaaccttacccatccctgtcatcacaaagaagccacctattttgctggagaagtgtttggaaagagacttaaaaaggctttttgtctgcctttgttagcgcttatgtttacttggtaggtttccatagtgtttttccgcagaagttggaatgagctcccgtgaccctcttggcttccggaagcctggggctctgctggtggggctgggacagggactgtagggtcctgcttgcttgtctcggggtgttgggtttgtattgtgtgtcgccgtgccttcctccaccttggagagctgctgtgtgagtcacttagccatttggccctgcaccttcgggagtaggggaatgattgcagagaggcccgtattgactaagtcccagatccatgagaggtgccatttcccagcttctgcagcagctgtgacctcgaaggtctcattcttgatgctgcaggtagaggccagctgggcctgcagagagctgcctcccacccctgctcctgcgaaggaggaagccaagagcccccaggctgcttggtctacacgggtcacgaggctggtggatggagcagtggggctggaacccaggtctcctttctcagcatccactactctttgatcattttagacatgttgcttgaatagtacaagggcacaaggagctcagtaaaataacctggtcattgtagctctggacatccctgcagaaagggctgagtggcagctgtgatgagagggggtataagagccacaggggatccatcgaagaagcctttgcagagaccaagagtgccacgacccagcagagacaacaagagagggtgccaggcagtgtgcaaaaggttcaggtgccaggcagccacggaagctccggggaggcatgaagacatgagggttagattgtagcaggtcacgtccaccaccctcactgtccatgaagatctggacttggggacactcacatgttcctggcgcacacacacacccaccccctcccctattcaggttcagaaattcctgctgcttgcttcttcccgcaccctcctccatttccccgccaagaagccatgcgcgcacacgcctcggtgtgaagcgcagattcaccaacagcaccgtcagggtgatggaggagagagttaacaccacgcacccacggcagacaactggagagctcggggagcagtttttcctccaagtccctctccctcctgtatcaaccccaaggatcactcttttgtttccttttagatataattcattttttaaagagcggttttaggtttgcagcaaaatggagcagaaagaacagagttcccatgtacctcctgccccccatctcaattatggacatcccactccagggtgggacatgagttacagttgatgagcctgcattaacccatcattaccacccagagttcatagttgatgttaggtagggttcattcttggtgttacacatgttatgtgttctgacaaacgtggaatgacgtgtatccaccataataatatcttacagaatagtctcaccgccataaaagtgaacctgcatcgacagatcattatctttcagagtccatagaaatatctttttttgagggagagtctcacactgttggccagcctggaatgcagtggcatgatcttggcttactgcagcctccgcctcccggattcaagcaattctcgtgcctcagccttacaagtagctgggatcacaggcatgcaccaccacgccatactatttttcgtatttttagtaggatggggtttcgccatgttggctagttagtctcgtactcctggtctcaagtgatctgcccaccttggcctcccaaagtactgggattacaggtgtgagccaccgtgcccagcccatagaaatatcttaacaagtaccctggcgattgtgaggcaggtggtgtggggatcaccctttgagatgctggtgtaaggagtttggattaagtttgaaaggcagtcggagcttctggaagcatccgggctgggccacggtctcatgccaggggtgcttacaaggaatacttccatgtgtcccaggactaagggaggagggtctcaggcattggtccctctgggccagcaagggcagcagggagagccccggttcagaggacccttcagccataacattgacccgtttgttcacactggacttcccttctcccttggggctgcaggaatttgagatagagctggagggctcccagaccctgaggatactgtgctatgaaaagtgttacaacaagacgaagatccccaaggaggacggcgagagcacggacagactcatggggaagggccaggtccaggtgaggcagccatccctaccctcccctgcccgatgcatggcgtcctttttcatgcagcccctggggacactgagatggtcatggccttgcacccagggtggggtggggtgggcagctgtggctctgaaacatccatcgtgggagacctgagccggtgcctgcatgtatcttgatgggtcttgacgtaccaccctctgtctgcgtgtctgttgcgtcggctcattcccaaaggaatttccattcaacttggttttgcagctggggcctcagttcctgcccggccttaggagaacccaaggtggaacagttagatggtgtcctaggctgaaattggcccatcctgtgccagtcttcttagaaaagcacaggggtcccagaggctgcctgcaagcacaggggtcccagaggctgcctgcttggcatcccctatctgtggtctagacccaatttctagggtatagagctgtatctctgaacagggtgcacacagacaggtctcctcccaggctaatctggaagcccccaggtgagaccgagaatgtgtccatacaggaccagcaagggggccctggttcttaaggagactgcctgggccctctgtccttcagaagcttgtctagcccctgggagcacgccaccagggtttcctggaggatcatagctggcgccccaggccctgtttatcctgttcccaccctcacaattgcgcgggggtagctgagaggaagccctgatcgtgctttccttatagtgcattatatcagtgggttgtgggtacagctctctcttcccaggaccttccatcttcacaagaggcctctagagggagtgggtttggctttccacatgcccctagaagcacagggctcctcaggaagcccagtctccctccctaagcaggaagtaaaaatcctcttgtggttaaataccaagtgccaggctgggcgtggtgctcacgcctgtaatcccagcactttgggaggccgaggtgggcggatcacgaggtcaggagatcgagaccatcctggctaacaccgtgaaaccccgtctctactaaaaatacaaaaaattagccaggcgtggtggcgggtgcctgtagtcccagctactcgggaggccgaggcaggagaatggcatgaacctgggaggcggagcttgcaatgagtcaagatcacaccgctgatctctagcctgggtgacagagcgagagtccgtctcaaaaaaaaaaaaaaaaaaaaaaataccaagtgccaggaagaatgaagggagagggtggctcttccctgagtcacctgtcatctttgctgatggatcccacattctcattcagatcagcaaatctttaccaagtgctggcctcacccccttctgccaccctggcctggctggccacatcttcggaggtgcagctactgcctgtttttctgccttggaagcttataagggaactcagtggctcagagcctcctggggctccctatactttgagatcaggtttaaaagcaaaaagactcctctggcacatgcctgtattccagctactcaggacgctgaagcgagaggattgcttgagcccagctattcaagaccagcctgggcaacatagacccctgtctaaaacaaaataaattaactaaaaattgctctcagctctcctgtcgctgtcccactgcactgtcttgttcactctgccagcctttgtgtggattctcatggtgggagattgtaccacacagatgggccacaccactcttgatggagtacttagtgctggtctcctttgagatccgaagtattttagcatcagtcaaatgacggtcatagtttgggtgatggtcacggctcaggttcttttttacacgtgcttgctttggttgttgttgttgttctttgttttcttgaggcagtatctggctgtgtctcccaggctggcgtgcaatggcaggatcatagctcactgcaacctcaaactcctggctgaagcaatctttgtgccctagcctcccaagttgttgggattacagtcgtgccccaccatgcctggctaagttgttttttgttttttgttttttttttttttttcgagacagagttttgctcttgttgcccaggccggagtgcagtggtgtgatcttggctctctgcaacctcccgggttcaagcgattctcctgcctcagcctcccaaagtgatgggattacaggcctgagccactgtgcctggccacatgtgctttcccattcggtccttgcagcagatctttgagagagctcatttgacactcaggagatgcttctctaacctgctcagaatcagggccctgggtattcagggaggtagagggagcagactgcaaagccagtcgtgctcccatcgctcccacttctctctccctctccatgttttctgtctcccccacccagcctagggcattcctcccccacagtccagcctgcatctggcacagtgtcactgctcagcccagggatactcacagcctgggtgcctggctccttttttcagctcatcaaaccaggtaaagggaggttcagattctgccaaccattgactcaattcatccaaatcttcaatcactggaatcctgggagtggctggatttgaaccaggacctctgagtactattgctaagtaactgggggtctcagtgaaagagagaaaagagctgataggcctcttcctgtgttatcatgtcaggccatcttttgaaactcttttctgcaatgctactgaagtatttatgcacgtgacctgtgctcttctgtcagtctaggggtgctggctgagcaccccaccccatcccggggaagaggagagcagtaagtgtcgaagaaaaacccgagctggacagcagttaaagtggtaaaagcaggttttgtttagtaactattgtgatagggaaaagactagaaatggaaggcctagaaatgggctcaatgctgaagtcacttggatgagtggggacttgcagccaagaagcagggtaggggttgatggatggaaaatgatgaagtaacatcagggggaagagggattctggtgaaaccgacccgacaggattcttgctgaagacaggccaaagtgatcgatctcccccgggggatggcgtggggtgaggaatctgatcagatagcaagggcagggggttctggctaaacggacttagcaggattcttgcaaaatttgggctcctgagaacatgcccaaggatgggatctagctggaataaaaagctggagggaccagatgagttccgtcaaggagagtctttgtcacacccccaccacactcagtgtgacctgggtgaattactgtcccactggcccaaatgtgtttcctcacttttccttcccttccttccttcccttccttcccttccttccttttctttctttcttcctttcctttttcctttttcctttccttttgcctttccttcttcttcggagtctcactgtcttgcccaggctggagtgcagcggtgccatctcagcttactgcaacctctgcctcccgggttcaagcgattctgctgccgcagcctcctgaatagctgttattacaggcatgtgccaccacgcctggctaatttttttgtatttttagtagagacggggtttcaccatgttggccaggctggtctcgaactcctgacctccagtggtccacccgccttggcctcccaaagtgctgggattataggcgtgagctactgcacccagcctcctcacctttaaatcttccccaaatatttgttcaaaacaaacatcactcattttgtgttcctgctgcaacagaccccctggggcctgcccctctccaaggctgttttttgttttttgagacagagtctggctctgtcgcccaggctggagtgcagtggcatgatctcggctcactgcaagctccgcctcctgggttcacgccattctcctgcctcagcctcccgagtagccgggactacaggcgcccgccaccacacccagctaatttcttgtatttttagtagagatggggtttcaccgtggtctcgatctcctgacctcatgatccgccctcctcagcctcccaaagtgctgggattacaggcgtgagccaccacgcctagctccaagactgtttaggggctacgtaagtttctctcctatgggcgcctctgccacatggaccatgtctcattcgtctcggaatgccccccaggcacatcacagacccccctgcacgggtgaatggctgtgtggacgagacctacatggccctgagataatccttgaaatacaaatgaggattctcgatgccttcgtggccttacctgaccatacctcccccaactcccatcacgtcccccgtgacgtgatctttattttggcttatgtttgtctctgctgctggaaagtaaacgtggaggacagggctttgtccagttcattctctgtggtatctccagtatccagacagagacataaaacatacatctgtatctgtaagttatttaatacattgtttaatggatctagagtttatatatatatatatatatatatagtaaaatatatattggcacaaagcaagtactgttacatgcactggaaattgctgagccaggcacctgccctctcacagatgaaggtgctgaagttcccaggggtggctggggcgggagccagccaagcctggggcttctccaccacgctgtgcatgtgcccagtggtggtcggggccttcatggtgagggggtcggggagttcagagtttggactcccacgtgcatccctgcaccatgggcagcctttttatcttagccagaaggctgagaagtaattccttcctttttaaaaaaattgtaaaataagcacaatgtaaaatgtcccaggtgtttttaagtgtgcagttcagtggcatcaggcacattcacattgttgtgcagccatcaccaccatcatctccagaacttttttttcatcctctcaaactgaaactctacacccattaaacaataactcccaggggggcaggtgcaaaaagaataactccccattcctcctgcccccagctcctgttaacctctagtccactttctgcctctgtggatttgcctactctagctacctcatgtaagtggaatcatacagcatttgtcttttgggtctggtttatttcacttagcagcatgtcctcaaggctcacccatgttgtagaatgtgtcagaatgtccttcctcttgaaggctgagtaatattccattgtatggattaacagacattcaccagcaggtggacgcctgggttctttccagtctgaggctggcatggtcagtgctgttgtgcacatggacataagatccacccaacttggtgttatctttgcattcgcaagctgttgccaggcacatccatgggctctcggggggaacagctgctgcagagtgggcagtccaacagggagaccgcccgaaaatgggtggacctcactgcgtggtggggacttgagagcagctgccagggtgccaccaggagggccccagtcagacctgctggcttgtacctggtcaggtgcccacataacccaggctggcagagaagtctgggaaactccagccagccagccagagcaccagcttcaaatgaagcagaggctcacagtccaaatctcatccccgaggctcacataaaacattggcaacaacaaaaatgaactctgatgcccccactggaacatgagttgtgagcccagcaagacacataaatagagcaggagaaatgggagaagacaaaagtctatgacttgatagaatgttgccctctaaggagaatagacagggctaacatgatttagcaacctagaaaatttgcagatgaagagagatgcacctgtcatcctagcactttgtgaggctgaggagggcggatcatttgacatcaggagttcaagaccggcctgaccaacatggtgaaaccccgtctctactaaaaacacaaaaaaattagccaggcgcgatggcgcatgcctgtagtcccagctactcgggaagccaaggtaggagaattgcttgaaccagggaggcagggatttcagtgagccagggtcgtgccactgcactccagcctgggggacagagcgagactatctcaaaaaagacagaaaaaacctgaagaaattcctaatggcagcaaggctccaatttccccagctctgccaactgtggtgactccctctctggcccaggatgtgcaggagcactgggactgtgtctcagggcccccgtccctgttgcgctgcactcggctaggctgcagactagccctccagcaatgtgtcccataccccgtcccatgaatcttggatggatgttgatgccttcaccttgaaaaatccctccctgaagatacagattcaatgtcccctgctctgtgaaggcttctctgtcccgtgacctcacttcccaagtaaccgtgccatctgagccaccagtcaatctgggccaaagcctgccctggctcttggcacatttgccacatccttcctttccagcttctctgatctagaccatgaaggctggggagaggggtcttcttgttcttggggacccccccgccaggcatggcacacaggaagccttccatgactagggtggcacagcgggttcctggtgtctgaggatggaccaggatggcctcgctcactcaaatggctcattcaggctcggggctggcttggaagggacacccgacttgggtcctcttgcacctgcccacacacaaggacttcaatttgtgctgtcagtggctcttttctggactgtgggcaccaccacagctttgtccctgctgtactgtgtatccccttgcctttctggcttgtggctctgaacaaagcaggtcacccatcccaatttctagagcccccccaccgccacccccaccctcatggagcctctatcgtgcaagaagggaggtggggacctggcaagtcatccaggacaggcatttgaagagcaggagccaaaatctgagactcgggcaagtggttcctaaacccagctcatcagcaccattaaggggagcaaaaaaccagaccgggccaagcccccagcccagaagatcccgactcctgctgcccacagacaggcacatgagcagctttgctgaggactcctttccatcccagacccctgcccttggggcctgccagggacctctgccctcatggttggatctggacactcccgggatgctgcggcttctctacctgctgcaactgcctcacctcacgggagggtctctctacgcaacttctgagtcgaggtgcataagcagtgtgggggctgtaggcccctgtagctggctgcagagagccaagcgcctcccacacggtacagcacagaaggctcctggtgtcactgggaaaagcccagattcaaaaaggctgggctccggagtcatgcacatcctctctcaggtatccctgtgcagaaaacagtgtccacgggggagaaagaggccaggctggtgtcgcagagcgccaatggcatagtcaccaccactcctccgacttacttcctcctgggatcccacaaacaagccccccagctgggagcctggacctccagggaccagggcagccgccacctacttggcgtgagtcatgaatgcccttcacacagcaatcagattccttcctgtctagccatggttcccacccatcactcccactgacacagggaccaggggctggagccagatagtgcctgctccatcgcctcctcacaaacgacagataaggatgagaacagcagcaaacgctgaccccccacccgtgagagcataagtcactcaaccgtcaaggctgcatggccccccccaccccaatttaattcacctgtgagagggcaagtgcctggctcagcaatttctagtgcatgtaacagtacttgctttgtgccaatatgtattttactatatatatataaactctagatccattaaacaatgtattattacataacttatagaggtatgttttatgtctctgtctgggtactggagataccacagagaatgaactggacaaagccctgtcctccacgtttactttccagcagcagagacaaacataagccaaaataaagatcacgtcacaggggacgtgatgggagtcggaggaggtatggtcaggtaaggcggataccgtcatgaaggcaccaagaatcctcatttgtatttcaaggattatctgagggccacgtaggtcttgtccacacagccattcacccattcaggggggtctctgatgtgcctggggggcattccgagatgaatgagacatgcatggtccatgtggcagaggcaccaataggagagaaacttatgtatgtagcctcttaaacagacttggagaggggcaggccccagggggtctcttgcagcaggaacacaaaatgagtgatgtttgttttgaaccaatatttggggaagatatgaagatgtaaacatcatgaaaatgtaagatcacatgagcaaattcttacacagattccacgggattcttcttgaagcacaccgccatcaacatggatagtgatacaggtcctccttgctctattgagagccacttttggaccctttatttttaacttttgtaccatgaaatgcatccatttttataaccgaatgattttatagtaaatttacagagctgtacaacttttaccaacaatccagttttagaatatttctatcaccccaatttccttgttgcctttttttttttttttttttttaagacagggtcttgctctgttgcccaggttggagtacagtggtgcaaccacactcagcacaaccttgatgtcccaggctcaagtgctcttcctaccttagcctctcaagtagctgggaccacaggcatgcgccaccatgccaggctattttttttttttttttttttttttgagacaaggtcttgttttgctgcccaagctggtctcaaattcctaggctcaagtgatcctcctgccttggcctcccaaagtgctgagattacaggtgtgaaccaccgtgcccagcccctgttcccagttatagccactcccagacccaagccgatctgctttttgtctttagagatttgcccattcttcacatttcataaacgtggaatcatactagagtgggcttttttgactgatttcctccacttaccattatgtttttgaggtttattcatgtggtagcattgtttggttcctttttatgataataattttccattgcatacatataacatgtttttatttctgcatttactatttgacagacacttggatcatttctagtttgggctgttaaggttgatgcagccacgaacatgtccttggtaccagtctctatatggacgtatgttttcattcactgagtaaacacctagtaagattgctgggctgtgcaacaaggtgactatttggggaactgccctacgttgtctggagtagctgcaccatcttacatccccagtggccatgtatgaaagcccatttctctacatcctcaccgatgctggttatagtgtatcctaagggagaagggtgtgttccttttgaagtgatgttagagactggttgggatcagagaagagaagcaaagagttaaaagtgggatagaggccaggcgcggtggcttacgcctgtaatcccagcactttaggaggccaagttgggtggattgctttaggtcaggagttcaagaccagcctgaccaacatggtgaaacctcgtctctactaaaaatacaaaaattaaccgggcatggtggcaggtgcctgtaatcccagctcctcaggggctgaggcaagagaatggtttgaagccaggaggcagaggttgcagtcagccgagatctcgccactgcactccagcctgggcaacagagtgagactccgccttaaaaaaaaaaaaaaaaaggtgcaggatggatctcaggagagcagattgtggtcatagactacagcaggaggcctgtaatctctctcctggtgaacacagaggttctctggtggtctcagcaaagacccacccccgggagtaggttatagtgcagacacatggggcccagacaggaacaactggggttgccctgctggaccatccaggctggtgacgatgggcgtgaaggaagctgttgtctacaaggagctaagtgaacaagcatttcctcctttggaaggtttactcatagccccctccctgcccctgctgagggtgggtgagaggatgtcctccggctgcccattggtgactcaatccagccacactgactacaaagcaagcagggcagtgctgggcccccagcagagccaccatgcaaagtggtcagtgatgcttcagggcagcacacagcacctgccccagttgggcttcggcctccctcagcccccaccccaccacttccctgggatggatgtgcacgatagttttctaggcagacctctaggccaccatctgccaggcccgctgaccatagtcattctttcaaggctcctgccttacccagtccagggggagaggagcagcaacctggtccatcctcctgagaccactgcatgtgagcagacagacccctgcctgcccagtccccggccaggcagcaggcatgttcctcaccaagaccttgcaacccagggggaccctggacagcatccggagtgcctcggtttttcccttaagggaaaactgtttcccccttggtcatctgtttttccaaaccccagtcttttgcttgtttacttctctggtgctttaaataactgcacgagagagcgtaccagccttgagcaatgtttgggattggctgagctgaggcacaggcctcattatcatgctattctttatacggcttccgctctgcggcgcacactctgttctttggaacagagccagccttgggacagcctttcccactggagctgccagtcaggaccgccgtgagagccagtgcctggaggccaacaccctggtcttcagtcactgggagtcacagagaggggcccgataaagagccctcctggcagcatcagtaccaggttggagtgggcgctggacaccaccaatgctggggagtggacgctggctggagccccacccagggctgcacattgctcagccagctagctctgggggagcaggacctgagcagggtgtcctccaccctgggtccatcagaggcactgcatttgattattggggttacctgctgggagtggtgcagattttggacagtctggattgcttccagcacaaggcaggctgaccagtcatactttactcagtctccaaacttgggcaacaggaaactagccacttgagaaggaagctcagcttttctgggctttagaggagatggagacacgttggaaattcccgtaaccaataggctggggtgggagggtgttcttcccacacacacacaaaaaagtggaacccggaggtgatgggaagctttgaccttggccagccagactgcggggtggggtttccctcaaagcctggtcaaaaggccttggaggctggaagctctcgtttagccccaccagcttcccagagcagcaaggccaagcatgcaagagtcaccatccaccctggccatgatgcagggcctcctttggtacttccaccccagccgggcgggccggagccgggcggcctctgctgaaaagcacctgtgggccgtggttccaggggggctttgaggggcagccgctgatgtctggacagcttctctttctgtctcttcttacctggactctgggttgcttgttagctgcttctgcctgttctgggttttcaaggggagaggggcccagtgatggctgttctttgaaggaaaggtaagaatgtctcctgcttaacatgtttctgtgtttccagttacttggttggttagtagagccagggtctctcgctttgttgcgcaggctggagtgcaatggcatgatcatggctcacagcagtctccaccttctagcctcaagtgttgcccccacctcagcctcccgagcagttgggactgcaggcacatgccaccatgcttggctaatgcttttgaaaattttttttttatagagacagggtctcactatattgcccaggctggtcttaaactcatgggctcaagtgatcctcctgcctcggcctttcaaagtgctgatatcacaggcagggtttccattttttaaagctcccagcagtggtataaactcctcctttccagagaaagcgcactctgtccgcatccctcatgttgtcctctcctgcctctgcttagggttcactccgggggaaagtgccacttgagagtttcctttttatgtgtggttctgactgaccgctccctgctcacagatgctgcttctcagggtggggtccctgaggcctggagtgtggcctctgacgaccttcagggccaggtgcggaatgagagcctgtggccgcatggcccccggtgggagacgtcccgccgccctttgcttctctgtgccactctggctgcacagttcagagccttgggaaacgttaaccagtaggacctagaaggggaggtgagaaggggtcaacccccaggtgtgcctgtggtgagccttcgtgctgagcaggtgcagggagggaggcccaggtgcacacacctgtgaagtaggggggcagctggctgggctccttgacctgctccagagcttcttattttctggccacttcacctgcagaaggcccaggtggctgtagccgctagggtcccttgcagtggaaatgatgcctgtcctcagcccctctctaggcctggcactgtgctcagcaccgtcgtgtgtgtgtatgtatatgtgcacgcatgtgaatgtgtgcagacatcatgaggtgtggtccctgctgttaggcagcttgccttgtggctgaagtgaaccatcacctgaatcaagggatggaaacacaaggccagatgcagtggccttctatggagtcagacggtggctccgtgacctggcttcactccagaactacctggggtttctagctgtgtaaatcccaggtcccactcagattatgagtcagttctctgcaggtggaacccagggaggtgttttttttgtttttgcttttatttttgagacgaagtcttgctgtgtcgcccaggctggagtgcagtggcgccatcttggctcactgcaacctccacctcctgagttcacaccattctcctgcctcagcctcccaagtagctgggactacagacgcccaccaccacgcccagctaatttgttgtatttttagtagggacagggtttcaccatgttagccaggatggtctcaacctcccgacctcgtgatccgcccacctcagcctctcaaagtgctgggattacaggcgtgagccaccgcacctggccagggaggtgtatttttaacaagatggtactgctcattcacccagcccagccagtgatcttggcatacccaggaaccgctgacatagaacgtgctccccataaaacgggagacagaggcttcacggatgggggacatgtggcttggtcatgacagggtgttacataccaggacagactgtgttcgggtgacattaaggacaagctcctgcaggctagctgtctggatagtgccgggtgggggtagaagttagaggggtcacagaggggcttcctcccggccccctcatcagctgcttgatttagggcttgtttctgggtccttctgggcctgattctgaaccatgggactggtgtggcctgcaggctcctcccgccacaagctgttcatggtgcagggggagaacagtgtccacaattccccagacagcagctgtggatgccaggcccccaggagttgttactgaagttgctgctggacagctcacctttcactgagctccacatagcacccgtggtgatggaagccggatggagagagcctgccagcctgcacatcagctcccaactgggcggggcagagggaggagggggtggggaccccaggcagcagggctctgggagcagtggggccctgggttccaggggtgtctggcaggcccctccttactctacctctgttggcctctggatggaggtgctggccgcagtcgggctctgcctctgactaagggttggggaagtggcgggtgtgggctgctgccccgtggggcctctgaacagaccccagggcctctgccaatcatgactccttcctttcagctggacccgcaggccctgcaggacagagactggcagcgcaccgtcatcgccatgaatggggtacgtgtccgtgggactctcctggtgcccacttcccccagaaggatagggtggcctctgttcatttcaaatcagtcagaggtggctgagcctgaggcagcatctgagagggagcctggttggagaagggagggcccccaagagcagaatcaccatgcacgggaatcgtcattcattggctggaatgcagttgccagccaggccctgagcatccctcctcaaacaaaggtctcatggcaccaccaggacaggtggggcctccactcagggacctgggggctgcccatagaaatggagacccctgatttgtctttaggtaccccagaaaggtttagaccttaaaagcaatgacacacccaaaaaggcccgggtataaatggtaaaatgttaatatttgagattcttggctttttcttacattattctgtctttcctacttaatttttaattgttactaagaaagagaaagccaggcacagtgcacctatagtctcagctactctggagtctgaggcaggagaatcactggaacccaagagttcgattacagcctgggcaacattgcaagctcctatatctaaaaaaaagcaagcaagcaagagaagcagcggggattttaggaggtgcttctgcagaaaccagtcgtttacatcatcttcaacaatcctggctcttgctgaagtagactaggggcttccccgaggggcggctccacctcatgctgagacctctgcatgccttgggggtggaaatatttgatgagactcccaggggtccttgggaccttgggctatgaggaccagaaggattagaggactgtgccccttctccctactgtagatcgaagtaaagctctcggtcaagttcaacagcagggagttcagcttgaagaggatgccgtcccgaaaacagacaggggtcttcggagtcaagattgctgtggtcaccaagtgagtggggaggggcttgggctcacgcactgagggtgcctgtcccttcagctgtttctgcagaaaagagcatgtgtgggtctctcctctctgtgcgtggccactgcacggtgaggtcaggccccagggaacacggcgtcttcagctacctcctgtgtttcctgcaaaccagctcaggaatgtccttgccacctggcttggaagcagtaggctggctccaggaactgcccaagtgcagggttttctgcccttgcttggaatttatcacggtcccagattcctgttgaatggccgtaacccctgcccctttgtcacgagtcagttgccaagagaagcctgtttggtttgagagcagttcatgcagacatagaccacttcctctgagaattcatttgcttccccaggatggaatctggctgggcctctgaccttgctggtcacgtgggccggggcctccatcagtcataccctggactcctatctgtgtctaaacaccacgccccacccccaactgcacggcagccactcgcatagcactctgggagggctgtgggcatgagcagcgaggactccatcagcagctcccccagataagccctgctaatgagggggcttgcgaagcagctttgatgtgctggtaaatccaggtgcaaaacagaactcaagttaaggcctccgcacagcactgcgttctaactgtgaaggattcttactctagtgtcctgtgtggaggtattggaattgtccattgctaagactcagaggagaaaagcacttagcatcgcaggacttggagcaccggtgctgaggcaacccttcattcattcgtcggatgtgtgttaaggcccaggcccagggcaggggtcagggattctcctctcacacagcacgtgggtggcaggaccaacaccgggtctgacctcccagccgggggtacaggctgctaaccccaggcctggaatctgtcagatgcccttcccgtgctgacttgacatagacaggcctcctgaccttcccgcaaaggtcatgtgtgattcgcaggggttctggccgcttgaaaggttcctgagaaagtacatgccatgaggacagagcttgcagagggaggacaggcatgcagaaggctctgtgtgcagccccagacctgggtaccttcgtcaccgtcctcaccccacctccgggtgtgcagatatggagcaggtctcctgtgttatggcccaagcagggctgttaggacactgagaacattccctcctcccgcaggagagagaggtccaaggtgccctacatcgtgcgccagtgcgtggaggagatcgagcgccgaggcatggaggaggtgggcatctaccgcgtgtccggtgtggccacggacatccaggcactgaaggcagccttcgacgtcagtgagtgttggcctgcgcaggacgggatggaggtgtgggcaatggtgtccgcgatgagatctcagagtgctccatggcccaggcatgtcacatccttctctgtgtcttttcttcatttactgtgttattatttttaaaaaagagaagacaagagttgtagaaaaagcctctgtagaaaccagtttttaaaccatcctagccatgcatgccacttgctggggtaggccaggggtttctgcagggccttggccttcctgccttggggttggacaggaggtggaagcccaggactcagtgcagtctgtcccctgccatgtgtgaggatgcggcaggcagagggcactgatgaaattcagcccaggctggggctgcagcatctctgcctccatctcaccaaccctcacaggctatgaaggacctggaactgtcacaaatgccaggggagggcactgagaccccagagggtccctcccagcatcttcaacaggattttgtgcctgcagacccttctttggggcacacaccaccaaccctgaccaggacccctagaatgcccagcatccctgggagggccctgtggtagtttcagctccctctgggggcccagaatgaacctggcctgtggtgaggatgtaagcaccaatggccaattgggtccaaaggaagacaccggttcaaacactgaaaccaatcagattctcccacggccttcctgctatcagacgacactggtgcaggggtggttgctatgtacagggcagagccacccaatccccacgcaggcgctgtgtcctgccacgctggcctcctcctggccatcacatcaggccaagcaggggagaggaatgggaatgcccacgcacccctatcaactctgcagacacagaaccatgcacagctcttgggaggagtcagatgagctgctcaaagcccaggagggacccgcacagtggtcagcatggcagggacagtgctttagccaaggcagggatggtgggagactcactcgggatcctcaaggaggccgctgcatttccgtgctctttccagataacaaggacgtgtcggtgatgatgagcgagatggacgtgaacgccatcgcaggcacgctgaagctgtacttccgtgagctgcccgagcccctcttcactgacgagttctaccccaacttcgcagagggcatcggtgagcactggaggccttggcctcatgggagacgtctcctccacgtgcactgctgcccttggaggctgtgaaaagtgaggtgtgggaacccaagctgtgccccctctgccatggtcggcattttaacccaacctcaaaaagcaggggaccagaaccgagcctgtcctggaaggccttgcccatccctagagggctccctgtccctactcctcaaggagaccaagaggctgaaatagtcagcactgctgtgctgtggggtcctaaagtctgctgtcctccttcctgcagaccagggctgaaggagggtgcctgggtgctcttgccatgggtcctggtccagccaagcatggtttcaaacatgacctgacccttagtcaacctggaggctgatgtctagagtgggtgctggtgtgtgcagtacctgtggcctctgcatcacccttagggcaggtctgcctcccgggcccatgcacagaggacctggtctcccagcctgcaggtgcccctgtggtgtccaggacgacgagggggtctctgcgtacttggtggggctgggaccctcccacttcccacctccttgtgttcctcactcccctgtttcattccatgctgagcctcccctgccttgggctcctctggggagggggtggtggcaggagttgtccaagggcagctctgcccatgagcagctgctctagcggctcctcctgctgctgtttgccgggtgctgctgacccctgcgaggtagagaaaaggcgttcaggtggttcacaccccacacaggtgcccctcacagggtcctcaatgggggccagagctgtgagactgaggatgatgacgagcctgggctgtgcagggacacaagccccaggtgctccatgtgaacacctcgggagaggtctctggctcgttgtgaccccaaggagtaacccaccgccttctgcagctctttcagacccggttgcaaaggagagctgcatgctcaacctgctgctgtccctgccggaggccaacctgctcaccttccttttccttctggaccacctgaaaaggtagcccagctctcccatggcagcccagggctccaggtccccaggccgcagagtgcccctctgctcccactagacccccaacaccgaggaccttttctcctgacccttgtctgcagtcactcactgcctttggcgactagtgccactgccacccctgccccagcctctcttctttgccaccctcctctctctgcactgtggccttaaaaaagagctcagagctttggccgtggccagcagtgcacttggacccccctcttccctccgagtcacatcaagtaggagacctccccaccagcccagagctggctccttgtcctgggccactgagacccagaagtaccagggctggagtcagcttgcagcacagccagggtcgaggtcactcccttcctgagaactccagcacagcccagcccctctgcctctctcctgggggtggcgttgaaacagcacccgctgctttggtcctctacagggtggcagagaaggaggcagtcaataagatgtccctgcacaacctcgccacggtctttggccccacgctgctccggccctccgagaaggagagcaagctccctgccaaccccagccagcctatcaccatgactgacagctggtccttggaggtcatgtcccaggtatgggaagacaggctccagcccatgcaaccctgacctgacagaggtggcctctgcctgccccacccccagtcctgcccatcttcttacttgcattgtatgtggtgtggccaacattcacagagagggacttgcctaggtctgcatggatgggagtgatagtgggggcccaggccacctcctggtcctgctagtgcactttgctggaagcttaaaactacctcaagtgttcgggtgtggtggctcatgcctgtaatcccagcactttgggaggccaaggcaggataaccaatcccaggtgtttgaaaccagtctgggcaatgtggcaaaccccatctctagaaaaaataaaaagaaaaattagccaggcattgtggcacacatctgtaatcctaggtatctgggaggctgacacaggaggatttcttgagcccaggagttagaggctgcagtgatccatgatggagccactgtactccagcctgggggacagagcaaggccctgtgcatctctaaaataaataaccaccccccacccaacaagtcatgccttgtcaggaccccaccccacccccatctcactgtaaggggttcatgacaccagcaggggtccccagcacctgagatggacttggaggcttgggccccaaagacctcccaccagcagctgtgagccccgctctgagccactcttctcttccctactctgcccgggcaggtccaggtgctgctgtacttcctgcagctggaggccatccctgccccggacagcaagagacagagcatcctgttctccaccgaagtctaaaggtcccagtccatctcctggaggcggacagatggcctggaaacctctggctaatcgggccatccgtagagcgggaaccttcctgaggtgtccttgggccacccccaagtgttgggccatctgccaagagacagcgacccaaagccgaaggacaggtggcctggaaagatcccgcccaggtctgggagccccaggctggcctcagactgtggttttttatgtggccacctgagggcgccccaagccagttcatctcggagtccaggcctggccctgggagacagggtgaagggagtggtttttatgaacttaacttagagtctaaaagatttctactggatcacttgtcaagatgcgccctctctggggagaagggaacgtgactggattccctcactgttgtatcttgaataaacgctgctgcttcatcctgtgggggccgtggccctgtccctgtgtgggtggggcctcttccatttccctgacttagaaaccacactccacttctaacagggtttgagaggcttagtcagcactgggtagcgttttgactccattcttggctttctttttctttccagaaggatttttgtgcagaaatgggtcttttgttgccatgttagtcctccttggaaggcagctcagaaggcctgtgaaatgtcaggggacaggacccccagggagggaaccccaggctacgcactttagggttcgttctccagggagagcgacctcgtcccccgatcctgaccgcccttccggcccacgctctcctgtttggcttccacaggcctggacttctctggcttctctgcccacacactccctgcccccagtgtccctgcccctgccccagcacaggtgacttcatttctgtcctctcagctcagtggactcgctcaacttttgtataagtctccacttggtggcagcagcttgctgatgacttgttttaaaactttcatcctaaataaccttttgatacttgaatatttgtaagttttatacatagtttctaatttttttccgaacagatccagatacctaataagatgctggaatgtaatccctggacaatccgtgtcctggcagcatttggtcttcctctaagcgcctggctccgctgttctcaggagtgggttctgaagtctctggagaacaggatacgtggagggttaggaaggggccaggcctagagacgggagactccctcccggagcaggtggaggcacaggaccattcgctaccccatctgccgacacctgcgggggagcccaggcattctttgtaaaccctcctgaccacctggctcaaagaaaacagaagcatggagaccgccaagtattttcaagaaataaccccatgaatattccatcacttttttagaaagaggggcttggggcaggcagaggagagaagggagagcaaactgagagccaagtttccacacggtcctgcaggaggagaggatgcagctgcccagagggaagcaggatcacatttaaggaagtgtgtggggtccctggatgacaccagcacccagtgcggctctgtctggcacccgctcccaaggtgggaggagtgggtgtcccctgtgtgtcagtgggcagctcctgctgaacccgcagctcactagggagcctgacagtggggccatgcgcctgacactcctctctgcttgtggacctggcaaggcagggagcagaaaacagccacttgaaggctttctgtctgcgtctgtgtgcagtgtggatttagttgtgcttttttcttgctgggagagcacagccaccatttacaagcagtgtcaccgtcgtgggtggcgaggacagaacaggagcctctgctctctgtacctatctgggcccggtgggctcccttgtcctggcttccatctctgtctcagcgaccattcagccctgcgcaggaacacgtgttgcttagaaaagccaaatccagccttgtctctgcctcctctggtctcatgatgtgcatctgttaccttgaaactggaaaccagtctatcaatgtctgtgccaattttttattccctccccaacctccttccccatacgactttttatttatgtaggatgtgtgctgtctaatgatgggatgaccacacttttccatgttctaaaagtgctcctctcccgcagggtcccagggctggtggttgctttgggtctacagctacgtcttacccacctcctgcctcaacagcctgtgtggtggcaaagccggtgtggggctggggaacgcagcgttctccaggagggggacctggctctccttctgcaatgcaggcgaaggcctagatgccagtgtgacctcccacaaggcgtggcttccagactccccggccggaagtgatgcttttttgccttgggccctgggtttgaagcagcctggctttctcttggtaagtggctggtgtcttagcagctgcaatctgagctcagccacctacacaccaccgtggccgacactttcattaaaaagtttcctgagacga

SEQ ID NO: 2 - DNA, 173795 bp, Homo sapiens
ggttggtgacttccacaggaaaagttctggaggagtagccaaagaccatcagcgtttcctttatgtgtgagaattgaaatgactagcattattgacccttttcagcatcccctgtgaatatttctgtttaggtttttcttcttgaaaagaaattgttattcagcccgtttaaaacaaatcaagaaacttttgggtaacattgcaattacatgaaattgataaccgcgaaaataattggaactcctgcttgcaagtgtcaacctaaaaaaagtgcttccttttgttatggaagatgtctttctgtgattgacttcaattgctgacttgtggagatgcagcgaatgtgaaatcccacgtatatgccatttccctctacgctcgctgaccgttctggaagatcttgaaccctcttctggaaaggggtacctattattactttatggggcagcagcctggaaaagtacttggggaccaaagaaggccaagcttgcctgccctgcattttatcaaaggagcagggaagaaggaatcatcgaggcatgggggtccacactgcaatgtttttgtggaacatggtgagtgcttttcaaaatttctgctcatggttttcctcatgcattcatcttaggccttcaaggaactttgaacaacagtacttgcgacagttccttccaattccacttaataaatttgttactgtagttatctcttagtggaactttctttgtataagaaaaagttacttcgtgacttcggctttattcaaaatctatttgagttgcttatttcttgcctgattcctctgctaattcactgttgaccttggacaagccactttactgttccagggctttagtttcctgaggggctggacttcagtggtttcttagggtccctggttctatgattctgctctaaccgaagtcgtgggctcttctgacaagcatggattctttactgctttgtctacagagagcttttatcatattctcaaagtggtttgtgttcctgagaaagttaagaatcatagatactggttgacgctaatatccttgaccttttccttcgtaagtaggacttgaaaatactcactttggagccatgtgggaaaaatcaagtggggaagcagcattccttgtgaattttagatagacagcttctgtcttaccttccataaggagtaatctcttcctcgttgatgaagctttcatcctgtcttctccctgtttagaatgatatttgggccaataaaggttatctgtgacatttttatgaacatatttggcatttgaatgctgcccgtacattttatgttgttcatgtccagtaattctgtgcgaagttaaagctaagggtcggcttacactgatgtctataaccagttaattagggttactgtttgtactgttgcagcctgacattttttggattgtgtcctttatattaaaaaatcagttgagcccacctatcctataagcaaacgtatgaagtgtgccagtggcttatactttgaaattcattcagaaataccccaacattgggtgactgcagtcaacaaaggcttctgttggatgaacttgcatttgacagctgaagttttactttcttacgggaaaatattcacttcatctaaataaatccgggtgcttggattttactttgccttgaaacattagttctattttagctttgtttttaggcaggcaaatatggtaatgtgttgttatgatggttcccaaattcaggatttaaaaagtgaattatttacattttaactagtgatgatcatgcaccttacatagtgaaaattggaacagactttttggagagctttggcggaacttatcagaatttgaaatgtacgtgccaatgacccagtaatcccattctgggaagctagtagagaaagcagtgtagttccctgtgtgtccctgatatctcttcaggggttgagaggctaaaactattttcttgttaatagagtaccaaggtcttgtctcttttgctgtgttgacgtttgcagtaatggtacaaaagtaaagcaggtgtcttagcatgattcagggttgtggcacctaactatacttgtagtcattgcattcttcatgacgtgcactcacagttaaacaaactaaatatatatatacacacacacacacacatatatatccacttttcactgaaaaatgtccttttttttttttttttttttttttttttttttgagtcagagtctctgtgtgtcacccaggctggagtgcaggagtgcagtgtggcgatctcggctcactgtaacttctgcctcctgggttcaagcgattctcctgcctcagcctcccaagtaggtgggactacaggcacgcgtcactgacgcccggctaatttttgtattttttagtagagacggggtttcgccatgttggccaggctggtcctgaactcttgacctcaggtgatccacccaccttggcctcccaaagtgctgggattacaggagtgagccactgcgcctggctagttttcactggacaataccttgatgaagcagcaaaaattattaattttattacattttgacccttgtgtatgtcttcttaatattctgtgggttaaaaaggggggtatgcatcaagcacttctgtacagtaaagtataatgattatctccaggaaaagcactttggtggttgggttgcaaactgaactagccacttttttcatggactgccatttttacttgaaactatgacaaactatggttattcagactaaaaagtgtatgaaggaatctttcaaagaaaacaacaggtagcatttgttgccaatgatgaaattttagctttccagtgaaaattaggattttggagaattttttttttttcctcttcggggtagagtttcgctcttgtcgcccgggctggagtgctgtggtgcaatctcggctcactgcaacctctgcctcccgggttcaagcgattctcctgcctcagcctcccaagtagctgggattacaggtgtgcaccaccatgcctggctaatggagaatttttatctgcctctgtgatatagagattggtggtaatatttacagatgccatattttaatatcttataatgaaatgtattatttggaagatctacataaatcagtaaatcaatattttcttttttgttcgtttttgcgacagagtcttgctgtgttgtctaggctggagtgtagtggcatgatctcggctcactacaacctccacctcccaggtttaagcaattctcgtgcctcagcctcctgagtagctgggattacaggcatgcaccaccacaagtgaataatttttgtatttttagtagagatggagtttcaccatgttagccaggctggtcttgaactcctgacttcaaatgatctggccacctcagcctcccaaaatgctgggattacaggtgtgagccaccgtgcccagccaaaccattattttctaaatgatcaatgcatgatataaaatcatgcacaggttaaagatccattcaaagtgcaaaatggaggccaggtgctgtggctcgtgcttgtaatcccagcactttgggaggccgaggcaggtggatcacctgaggtcaggagttcgaacccagctgtgcaatctagtgagatcttacctctacagaaatttaaaaaattagccaagctcccactggagccaaagagtcgaggctgcggtgagccatgaacacagcactgcattccaatttgggcaatagagggagaccgtgtctctggggggtaaaaaaaaaaaaaaatacagttcattggtagagtttcttaaaggcagccagcctttaagaaattcctggctaggccgggcacagtggctcacgcctgtaatcccagcactttgggaggccgaagtgggcagatcacctgaggtcgggagttcaggaccagcctgactaacatggagaaaccctgtctctaccaaaagtaaaaaattagccgggcgtggtggcacatgcctctaatcccagctactcaggaggctgaggcaggagaattgcttgaaccccggagcggaggttgcattgagacgagatcacgccattgcactccagcctgggcaacaagagcgaaactcttgtctcaaaaaaaaaaaaagaaattcctggctgggtgtggtggctcacgcctgtaatccgagcactttgggaggatgaggcaggcggatcacttgaggtcagtagttcgaaactggcctggccaacgtgatgaaaccccgtctgtactaaaaatacaaaaattagatgggcgtggtggcatgcacctgtaatctcagctactcaggaggctgaggcaggagaatatcttgagccccgggggaagaggttgcagtgacctgagatcgcaccactgcacttcagcctgggtaacagaatgagactctgtctcaaaaaaaaaaaaaaaaaaaagaaactaccatttaccatgttttgatgtagcatcaaagaacaatatctacggttatctagaaagtctgttttggggggagaaaacagttattttccagtaataaaaatatttgtttttaaatgaataattatgtttttaaatttcagtattcatttctaatgtggtaactattgatgagataacctacacaaactaagcctcttaggggccttcggttatttttcaagagtgtgacaagggcctgagattaaaaagtttgaggccaggcactgtggcttatgcctgtaatttcacactttgggaggccaaaggcaggtggattgcttgagcccaggagttcaagatcatcctgggcaacataagaagaccctgtctctacaacaagaacaaaagaaattagccagacgtgttatcacacctgtgttcccagctacttgagtggctgaggtgggagggtcacttgagctcgggaggccaatgctgcagtgagccatgatcacgccactgcactgcagcctgggtaacagagcaagaccccatctcaaaacaaagtttgagaactgttgctatggaaagtctatcaagaaggcacatagggatgtttgttgctgaagtactaacactgaatgatgtctgtgttgtggtgagtagaaaaaaagcaatttgaaaatcattatttatggtatggccccatttttgtaaaacaaaaatatctgtttatttgtgtatgtccaggaaaaaaaagtatggaaggattttacaccgaaatttttatctctagggacttggagctttaggtggaatcggagaaaactttctctttttggtttgtgtgatgttccaagtgtctttttacaacaaacttgggttatcttataatacgaaaaattcgaagatttaaaaactgaggccaggcacggtggctcatgcctataatcccagcactttgggaggttgacacatgtggatcacctgaggtcaggagtttgagaccagcttgaccaagaaggtaaaaccctgtctctactaaaaatacaaaaattagctgggcgtggttgcaggtgcctgtagtcccagctactcgggaggctgagacaggagagttgcttagacccaggaggtcgaggttgcaacgagctgagattgcacgccactgcactcccagcctgggcgacggagtgagactccatctcaaaataaataaataaataaaaataaaaactgaattgatgacagcccaacctgtcacttttttcagatccctttttatgaaagaatttgcttaagttgtgtctgaagacaaaccaatttctttggaccctgggtattctttttctaagggaataccatgttattttgtgttacagattgtttgcgatctttcataggctgatctttctagagttggttaatatccatgtaggttagattgaaaaacttgaattcagaaatgtacggtgttggagcagacatggatctggaagccaagaatagcgttggtgttgttgttgatggtgaatctgaaagagtgggcagatggcaactttttgccagaatcattcagggtcaaagggctagtcatatttacaagggaaaagaggaaaccatgttattaaatatttcatgcaccatatgttcctttcaaatttcagtggcttgactaagaaaattcacttttgggagagttggtacaacaattgaaagcacttagtagtcaactttttccttagtgtttccttcttccttcaacaaacatttattttattgagcacagactatgacaggtcgtgttgtagtcactgatgatatatttgtaaacaaaacaatccctgccctcctagaacttacattctagtgggaggagacacatcataaataagctaagtaaataaaatacagatatgttagtgatatgtgctgaggagaagaataacatagagaaggggacagggaatggggtaggaggtgtaattttagttagggtggctagagaggcctgactgagagggcggcatttgattaaagacccgaaggaggaagatgagcagcaggccctgttgaaatatgtgaaagaatttcaggccgagggaaccaggatgcagaaacctgaggcagagcttgctagtttcaaggagcagcctagaggccactgcaccagagcaaagagcaaaaggagagatgcaggaggtaaaatggagggtgggaagagaatggctgaaggagagggtggccttattggcccatttcaaggattttgactttgattcatatgatgtgggaaggccttggagaattttccgaggggactatactatctgatgtatgtttcagtatgaaatagaatctctctggctgctatgatctgaaggaggacaagggagcagggattccacgggggcattgattgcacagagccaggtaagagtgatgatgcttggaccaaagtggtggcactgggtggagggtcagaaccgacaagatttgctctcggattagatgtgggatatgggggtgtgagaggggccaagtgtgactctcaggttttcgaactgaataactggaagaatagagttgccttttattgaaatgaaggtcgaggctgcagtggtaagctgtgattgcgccactgcactccagcctgggcaacagagcaagaccctgtctcaaaaaaaaaaaaaatatttaccatcaggtaaaaccacttatggttctcaaaactttatttaaaataatagacacttgataaatcaacactgtaggccgggcgctgtgactcacgcctgtcatcccagcactttaggaggccaaggcgggcggatcacttgaggtcaggagttcgagaccaccctggccaacatggtgaaacctcgtctctactaaaaatacaaaaattagtcggcatggtggcacacacctatagtcccacctacatgggaggctgaggcagagggatcacgtgaacctgggaagcagaggttgcagtgagccaagatcatgccaccgcactccagcctgggtgacagagcaaggctctgtctcaaaaaaacaaaacaaacactaattctcattactcttaaaattatactaaggccaggtgcggtggctcatgcctgtaatcccagcactttgggaggccaaggcagatggatcacttgagcccaggaattcaagaccagcctgggcaacatggcgaaaccccatctctactaacagtacaaaaaattagctgggcgtggtggtacacgcctgtaatcccagctactcaagaggctaaagtgggagaatcacctgcgcctgggaagccaaggctgcagtgagctgtgatggtgctattgcactccaatctgggtgacagagtgagaccctgtctcaaaataaaataaaataaaattatactaagtatctgtatacattagaaggtgggaggaagtgcaattattggatcctataggcattaaagttaaatttgtcaggtttttttttgtttttttttttttttttgagacagagccttgctctgttgcccagactggagtgcagtggcacaatctcagctcattgcaacctccacctcccgagttcaagcgattctctttcctgcctcagcctaattttttgtatttttattagagacggggtttcaccctgttagccaggatggttttgatctcgtgacctcatgatctacctggctcgacctcccaaagtgctgggatttcaggcgtgagccaccgtgcctggctatccgattctcaaagaggttatttggacaggctgggcgtggtggctcacgcctgtaatcccagcactttgggaggctgaggcgggtggatcacctgaagtcaggagttcgagaccagcctgaccaacatggtgaaaccccatctctactaaaaatacaaaaattagcagggcatggtggcatatgcctgtaatcccagctactcaggaggctgaggcaggagaatcgcttgaacctgggaggcagagattgcagtgagccaagatcacaccactgcactccagcctgggcaacagagcgagactccatctcaaaaaaaaataaaaaggttatttggaaagattatatccatctacttaatgctagggattggattgtggcacgtggactgtgaaaatgcaaaattggaggtatgtactttattttagagacagggtcttgctttgtcacccaggctggagtgtagtggcacagtcatagctcactgcagccttgaactcctgggctccagtgatcctcttgccttagcctcccaaagcaatgggatcgtacaggtgagccattgcacctggccatgtatgtacattttttataagcattcagttgtttccaatagtctaatacattttgtatggccttcttatttttcatgaaaccttactacccattttaagaaatttgtaatatagaagaaaacagaagtttcaattgtggggtaagtaaagaaagatgatcaaagatgatttgaccaaaagagttttacttcatttaaatgaagcatgttgtcaaagaaaatgaaagtgggaaaaaatgtgaaatcattttgtatcagttcaggacagaaccgtgcttgtgcttcagatctccaagtgtgaacacactgatgtgttgtgaagtgtgttgcaaatagaagcattttttgaatgggagggagagggatgtgttaacatgatttagctgggaattaaacccataggaatgtgtcgggcatattttctgtgactagggggtaaaaagattaaaatggctactgaggatgggcttcagtaagaggaggtctcccgaaggccttctctgccctgtgcctctgcagttccctgactccttgctgtgttcgtccctgcctttttggtagttgtgcccctgatgtcactcccctgtgtgttcagatcctacctgctggccaggtgcagtggctcacacctgtaatcccagcactttgggaacccaaggtgggacggtcctctgagaccaggagtttgagagagtggcctggacaacatagcaacaccctattagtactaaaaataaaaaagttagctaggcataataatgtcctgtgcttgtctagctacttgggaggctgaggcagaaggattacttgagtccaggagttcgaggctgaagcaaactgtgatcatatcattgtactccagcctgtgtgataaagcaagaccctatcctttaaaagtaaaaaacaaacaaacaaacaaaaaacaaacctgcttaacctttcaacactctcttccagtcccccctcccttctgaaaccatattttacatctctggtcctcattaaattttctgtaacttctgcccttgtaactcttctgcaacacaaatgaatacataatcatatacttcctagtagtatttcctaatagttttatgtgagtttcatggaagagagtgttgaaacgtaggtaggtttgttttttattttttaacttttttttaacttttttttttgagatggagtctcgctctgtcacccaggctggagtgcagtggcgcgatcttggctcactgcaagttccgcctcctgggttcatgccattctcctgcctcagcctcccgagtagctaggactacaggcgcccgccaccacacctggccaatttttgtatttttagtagagaccaggtttcaccatcttagccagtatggtctcgatctcctgacctcgttatccacctgccttggccttccaaagtgctgggattacaggcgtgagccaccatgcgtggccttttaaaaaaatttttaagagataaggtcttgctttgtcgcccaggctggagtacaatgatatgatcactgttcactgcagcctcgaactcctcaagtaaactgtaagcttgtgaatgcaggtttcatctcattttctgtttccccagcataatgctgaatacataggctctccataaaaaaaattcttgataagaatgatattaaatggactaaatgagaaattaaactttttattcacttacaaggaatgaaagttctcaaatagctaacttattttcttatgtatcctaggactttttatctggttctggggtttctttcccaatgaatatacttatatatgtttattttatttatttatttttgtatttttaaaaaccagaacatttattgtgtggctaatctttgaaattcttggctgggctcggtggctcatgcctgtaatcccagcactttaggaggccaagatgggcggatcacttgagctcaggagtttgagaccagcctggccaacatggtgaaaacccatctttacttaaaaattagccaggcgtggtgacgcatacctgtaatcccagctacctgggattgtgccactgcactccagcctgggcgacagagcgaaaccctgtctttaaaaaaaaaaaaaaaaaaaaaaagcaaataaattcttgagatgaactggatgctgcaacagctgcccttttgggtttaggtgttgttcctttatggaaatccacgccgcttcattcgcccagtccctgtggcctttagtcttttagccttggcacaccagtcatacttcctcttgcgcttggcggggtagccacatttgccacaggtagacttcggaaggtgacaggccttagagccacagtggccgcacaacgtgtgcatcatattgcaacgcttttcaaacgataacgttccctttgtcatctcccttctgtgtttatttttttattgtggtaaaatatacagaaaagttaccattttaacctgtttaggtgtataactcagtggcattaagtatattcccagtgatgcagtcatcatcactatccattttcagaactttttcatcatcctaagtagaaactctgtacccattaaaaaataatatcccatttccctctttccccacttcttggtaaccacttttatgctttttctctctatgaatttgctcattctaggacttcatataactataataatacaatatttgcccttttgtgtctggcttatttcacttagtgtttttgtttgtttgtttgtttgtttttgagacggagttttgctcttgttgcccaggctggagtgcaatggcgcgatctcggctcactgcaacctctgcctcccaggttcaagcagttcttctgcctcaccctcccaagtagctgggattacaggcatgtgccaccatgcctggctaattttgtatttttagtagagatggggtttctccatattggtcaggctggtctcgaactcctgacctcaggtgatccgcctgcctaggcctcccaaagtgcggggattacaggcatgagccaccgtgcctggcctcacttagcatgttttaaaggtgcatctgttgttacgtgtatcagaatttcttcttttttaaggctgaataatatcccattgtgtgtgtatatatatatacacaccaaattttgtccatctgttggtggaacttgtgtatggtggtttttttttttttttttttttttttttgagacagtctcactctgtctcccagactggagtgcagtggtgtgattgcctgagcccaggagttcaagcttgctacaaccttgacctcccgggctcaggcagtcctcccacctcagcctctcgagtagctgggaccacaggtgtgcactaccacacctggctaatttaaaaaaaaaatttatagagacagagtcttgctatggtgtctaagctggtcttgaactcctgggctcaggtgatactcctgcctcaacctcccaaagtgttaagattacaggattgagctcccttgcgcgacctgatattttaatattttttttaaaaaagtgtaatatgcatacagaaaggggcacaaattgaatgtacagcttgatgaatgatcacaaatgaatacctctgcattccactatcttgcttaagaagtagaaaattgtgagcacacctcagaaagccttgtgcccccttccagtttcactcctgccttcctcctcctcagagataactactgtcttacgttttagcaccatcgattagtttcccttgtttttgtttttaatattcccttgttatccttttaatgtctatagggtctgtggtgatatgctttttccattcctcacattggtaatttgtgttttttctctctgtttctctctcacacacaccttttcagttagttttgctgagggtttaccaattttattaatcttttcaaaaaaaatttgttaactttctcaattgttttccattttattgatttctgctctttattttctttcttttacttaaaaaaatttttttttgtagagatagggtcttgctatgttgcccaggatggtctcaaactcctggcttcaagcgatcctcctgccttggcctcctgaagtgctgggattataggcgtgagccactgcacccagcctactttgggtttaatttgttctttatttctagcttcttaaagtagaaatttagatcgattccaaacccttcttgtccaacataggcatttaaagctgtgtatttcctactaaacactgcgttagctctatcacataagttcatcacataagttttcatgtgttattatcaaagtgtttgatttccaagtatttgggaattctagatatcttggtttctaatttaatttcattgtggtcagagaacatcttctgtagaatttcagtcttctgacatttaccaagactaattttatggcccagcatataacctgtcttagtgaatgttccatttgtagttgaaaaaagtttgtgttgttgcatgtagttttctataaatcaagttgtttcatgcttttgtttaaacatcttctatattcttactttttattttgtacttacttcatctatagctttgctgaggtttttttttttttgtagagacaaggtttcaccatgttacccaggctggtcttgaactcctgagctcaagcaatctgccctcctgggcctcccaaagtgctgggattacaggtgtgagccactgtgcctggcggtatctctcttttttactgagagagtgatgctgaagatcaacagctataatgatatattcgtttattttttcctttaattctatcacttcttttactcttaaaagcatttattccgccgggcgtggtggcacacgcctgtaatcccagcaatttgggaggctgaggtgggtggatcacaagttcaggcgttcaagaccagcctggccaagatggtgaaaccctgtctcttactaaaaatacaaaaattagctgggcttggtggcagctgcctatagctactcgggaggctgaggcaggataatcccttgaacccggggtacagaggttgcagtgagccgagatcgcgccattgcactccagcctgggtgacagagtgagacaccgccccccccccccaaaaaaaagcatttattaggaaacaggaaagactgaacaagaacaagagaactaagcatgtaactcaagaagccagagaaccaaagtaatcccacagtacacagaagagaataataaaaataaaaacaaattaagaatggaaatgatcaataaaaccaaaagctaactttgaaaaatattattgatctaggcacacttctggtaagactaatgaagaaaaagaaaaggtagaatatttagaaaaggaacaatatttagaatgaaaatataactataaatactctcagtttttgcctctttttttgtttgtttgttttttggagacaagatctcactctgtcactcaggctggagtgcagtggcaatcatagctcactgcaacctccgtctcccagactcaagctgttctcccacctcagcctcctgagtagctgggactatgggcatgcgccaccatgtccagctgattttttttttttttttttgtggagacggggtttcatcatgttacccaggctggtcttgaactcctgagctcaagcaatctgccctcctacgcctcccaaagtgctgggattacaggtgtgagccactgtacctggctggttttttttttttttcttttctttcctttttttttgagacagtgttttgctctgtcgcccaggctggagtgcagtggagtgatcttggctcactacaagctccacctcctgggttcatgccattctcctgcctcagcctcctgagtagctgggactacaggcgcctgccaccacgcccggctaatttttttgtatgtttttttagaagagacggagtttcaccgtgttagccaggatggtctcaatctcctgaccttgtgatccacccgcctcagcctcccaaagtgctgggattacaggcatgagccactgcgcccagcctgttttttttttttatagtttgtatttttctgctgagattcaccatgttttcattcattagacctgtcttttcctctaaatcctagaaggtatttgtaataaagaccgtgcctgctaatttaaatatctgagtcatcttggggtctgtttttattgattgctttttctgtacattatgagtcagattttcctgcatttttgcatgttaaataattttgattgtatgccagacatgtgggtgttatattgtagggattctcaatcttgttatctttctttaaagaagttttcattttgttttgacaagtagttaggttactgtagttacttaaattactgtaagtgactggtcgttaagttagtttgaccctgccaggtttggttttatgctttgttagtatgggtttatccttggtccagacacccggcccttagaatagagggtactctttagacttaatgcttggcctttttggggtcgaaacaaaataacagaggtgctcagcaaagtctctccaccctggatgaactggtacttgaatgtcttccagcactgtgaaacctctgtgtctgtgcagttctcagcctcacagccaccgctgtctgctaaactgcatagaatctggaagccatggacccacaggatgcctcccaccttcttctgcctacctctgtgttctgtcaccccacccatgccctcatcttctctcagatttcttgccctacaaattctacctgcctcagcatcctcaaatccaagtctttgcttcctcagttcacagagatggctgctgtcagtttaggtttcatctccctgcactgtgtttgggaaggtgccccaggcaggaagttggaagcaacatgcaacttaccttatgtttttctctttcctcaagggtcacagccttgccttgccttgcctgtcatctaatgcctgaaaacagtcgtctcaaatattttattcagccatacagttgtttaggacaaaaggatatctaataccacttttactgcattatggacagaagcagaagttcaattctgcatattctttttttttttttaagatggagtctcactctgtcgcccaggctggagtgcagtggtgtgatcttggctcactgcaacctccacctcctgggttcaagcgattctcctgcttcagcctcctgtgtagctgggactacaggcatgcaccaccacaccaggctatttttttttttttttgcatttttggtagatagggtttcatcatgttggccaggctggtcccgaactcctgacctcaagtgatccacctgccttggccccccaaagtgctgggattacaggcgtgagccactgcgcccagccagacttttttttttttttgagatggaattctgctcttgttgcccacgctggagtgcaatggtgcaatcttagctgaccgctacctccgcctcctgggttcaagtgattcccctgcctcagcctcccgagtagctggaatatggacatgtgccaccaaacccagctaattttgtgtttttagtagagacggggtttctctgtgttgatcaggctggtctcgaacgcccaacctcaggtgatccgcccacctcggcctcccaaagtgctgggattacaggcgtgagtcaccgcgcctagcctccggccagacttttaaatgttagccttgcaggtagttgtgcagtagtatctcccagccttaatttgctcttctttgatgactcatgaggttaagcaccttttcatatgtttactggccatttggaatatatgtgtacctatgtatctcttgccagttcacctcttttgtccatttttctatttatgtttattcctcattgatttttaggagttatttatattttttttcctttttttttctttgtttgaggcagagtcttattctgttgcccaggctggagtccagtggcacagtctcggctcactccaaccttgacctcctgggctcaagcggtcctccaacttcatcctcctgagtagctgggactataggtgtgtgccaccacttctggttaattttggcattttttgtagagttggggttttaccatgtggcccaggctggtctcaaactcctgaggtcaaaccatccacccacctcggccttccaaagtgctgggattacaggtgtgagctaccgtgcctagcctgtgtactctcaatacaggtccttcgttgggtgtatttattatgactattttcttacactttgtggttcaccttttcactctttatttacataattatagccattgtgcgttttcactctatctctcttttttttttttttttttttttttttgagacagagtcttgctctgtcactcaggctggattacagtggtgtgatctcggctcactgcaacctccgcctcccaggttcaagagattctcctgcctcagtcccccgagtagctgggattacaggcgcccaccaccatgcccagctagtttttgtgtttttaatagagaaggggtttcaccatgttggccaggctggttttgaactcctaacctcaggtgatccacccaccttggcctcccaaagtgctggggttacagacgtgagccactgcgtccggctgctttttcactctcttaatggtgtctttgataaaccttaattttgacttagtctaatttaatcttttatggttagtactttttttgtggtctgtgtaagaaatctttgtgtctaccctaaggtcacaaagaagtttcactctcttacatctcatgtttatagttggcctggaattgttttttctgtgtaggggcgaaggttcattttttccctcatattgacctagctgtttaattgaaaagaacatctgctgctgtgtaaatcaggtatacatgtacgtgtggatctgctggggaactccttcctgttaatttgtttgtctttccttgcaccagtattacaatgtattactgtagctttaaaataaatcttaatgcctggtagaataaggcctcctgttttgttcttcaatattgtcttggcttgctcctttgtatttccatatacattttagagtgggttttatcagcttccatacccaaacagaaatacccttaaggattttcttctctgattgcactaaatctataggtttctttgatcctagaaatgaataatagaatataaagaattcttattgatgaaagaaagctatttcaggaaacttttttttttctgttaatgataaaggctaaatgattcctgtcaattgtttcaaattttcaactttcaaaatacctgctgcttctttccaattcacctttctctattctttttttttttccaattgtatttttctttgacactcagtacttgtcccttgatagtggagaccatgtttatacattttcatggatcgaacagtatttttttttaacagactagctacttagtgaatacgcagttgaatctacttgtttggcaggttcaggcattgaacaagtactaagtgcctgttctgtatcaggtactgtgtcagtctggggtaagagagccaggaacaacatagccaacaaaaggctctttgtgtctaatttatattcctgaggaccaccactggccatctgcttgggagaatggttatggcttgaataaacagtgtggaatgggtccagggaaccggctgaggaaaggggacatttactcaacctgatcttctttgttaagcagtggagagacccctggtggagccagcagtatcctttatctataatagcttgcttttcatcttttttatatcagtggctgcctgtggcctctcaccaaatctggtggactcattttctctgtgtatttagtttttctcctggaaatgactaacagctgcttaagtccttattcctttctccaggtttctggtgctgccataatttgttctatccacttgggatactgctgtagtgggaatattgtccctgttaccatcttcaggttacaaaccttttccccagcttgtggtaaaatcccgggggtctggtggatcccacgcattttaggatgtatatgggaagctaacattataggcacagtgtttttttttttttcactgtgtccgtctgttcttcagaggagcaaaggctagcatgacctttaagtcctcctttaagagtactgaatttctgccaggagcgtggcttgttcctcaagtgtcgctaggtgaattgttattagcaaggagggatgaaattgcgaaatcttaaaaagtagagaattccttcagatttcattcttgagaggtagaaaacaggaaatagaattgctaaacagagaaggggagtgtttttaatagagatatttgtatgagaataagaggatggagccataatctgaggatgcctgtcttgtttgctctttggcttagttggatcttgggttggtttacttcctgtacaaactgtgagttagtagggactgaatttacagtaatatctaaactgattggaaccttcacttgaacagaattgagttttggcgtgttcacttttaagagaaagaaacaaaggcagccaacccagtatcaagagtttagtcaaaacaaacaactcccagatttgccttggtagtgaatagattcagcatgtttgtactttctatttcttcagtatcatatagtaatttattgtttcattggtgattttgcagcatcctaggttgcaaagaatatctcttgtggatgtgtaaagttaaaaaaaaatttttttttcttgtagcagggtctcagtgttactcaggatggtcttgaattcctgggctcaggtgattctcctgcctccgcctctcaggtagctgtgagtacaggcgtgcaccactgcgcctggctgtaaagcacttttttttttttttttttttttgagacagagtctcactcgttgcccaggctggagtgcagtggcgtaatctcggctcactgtaagctccgccacctgggttcacaccattctcctgcctcagcctcccgagtagctgggactacaggcgcccgccaccgcgcctgccaccacgcccggctaactttttgtatttttagtagagatggggtttcaccatgttagccaggatggtctcgatctcctgactttgtgatccgcccgcctcggcctcccaaagtgctggggttacaggtgtgagccactacgcctggcctgtaaagcactttcatatacttttttgtgaggtctatggtataggcaggatacgcattattcctttctttcagtaggaaaacttgtgctttgggtagtcgtgtttttagggttacattgctgattagttttagagctgtggttgaaatcaagtgtctcttgacagcttgagtgtttttcaattggaaacattactttttgaggatagactaatgcattttgaaaacatttgcatcattgaaatgagtggggtctagctttagaatttaatcaaatttttaattttttcacaatttcgtggtatgatttttaatactctattgaatattctttttttttttttgagatggagtctcgctctgtcacccaggctggagtgcagtggcgcgatctcggctcactgccagctctgtctcctgggttcatgccattctcctgcctcagcctccccagtagctgggactacaggcacccgccaccatgcctggctaattttttttgcatgtttagtagagacagggtttcaccgtgttagccaggatggtcttgatctcctgacctcgtgatccgcccgccttggcttcccaaagtgctgggattacaggtgtgagccactgcgcctggcctgaatcttcttttttttttttttttgagacagggtctcactccgtcacccaggctggagtgcactggcatgatcttggctcactgcaatctctgcctcccaggttcaggcaattctcctgcctcagcctcccgagtagctgggatcacaggcgtgtgccaccaagcctggctaatttttgtatttttagtagagacagagtttagccatattggctaggttggtcttgaattcctggcctcaagtgatctacccgcctcagcctcccaaagcggtgcaattacaagtgtgagccactgcgcccagcctctattgaatattcttaccctttggtagttgagtgttttggaatggcggtgtgtaacaaacataccttatgtatgcttttatgatttataattttatgctgttatgaaattttataattataaaattatttataatttaaaaaatttatacattgtcctacaagctttgtggcagttttacgatttattttaaaattaaattgaactttttttgttgtgtttttttgagatacaaccttgctctgttgcccaggctggagtgcaatggcatgatcttggcttaccgcaacctccgccgcctgggttcaagcgattctcctgcctcagccttttgagtaactgggattacaggcacctgccaccacatctggctaatttttgtatttttagtagcgatggggtttcaccatgttggccaggctggtcttgaactcctgacctcaggtgatcagcctgcctcagcctcccaaagtgctgggaatacaggtatgagccactgtgctaggcctaaattgaacacttttgaatagataatacattttctaatttaaactacaaagctacagaacaaacatgtattttcagaagcttgcttgcacctctgccactctgtccttttccttctcctactcctctggaaaattttttgtgtgtggttttttttttttatccttccagtgttcttttttgcaaatacaagcaaatatatatttattacacaaaagatagcatacagtatataccgttctgtaccttcttttttgtttttcccttaatagatcctcaggatctccccatattggaatatgtatatcttccttctttttatggctgcattgaattccactatcttggaagtatcattggttttccaaccagttccctttctggacttttggagtgtttccagtctttagatatgataaacagtgcttcaggggtaacgttatagctgtgggagagattcctaaaagtcggggcactgggtttaagggtacatgcgtttgtcatttctgttagtagatggattctacttggtagatagctaccattttgcgtatgtctgtgtgtatatatatgtgtgtgtatatgtgtgtgtatgcatgtgtgtgcatatatatatatatatatatatatatattttttttttttaagacagggtctggctctgttatgcaggctggagtgcagtggcatgacctcggctcactgcagcttcagtcctcggggctcaagtgatactcctgcctcagcctctctagtagctggaactataaatgtataccactatgcctggctgttttttgtattttttgtagagatggggttttgccatgttgcccaggctggtcttaaactcctgggctcaagtgcctccttggccttccagagtgttgggattataggcatgagccaccacacctggcctgtattaatatagagtaatagagatctatattggtagatatttccacattttcttccgtagacatcattctagtttacagtcccatcgctggtaatacagaggttgccttcatccccaaagcctagctaagagagtgtattgtcaagctttgggactttttccaatctgatatctaagaaatagtattttagtatggttttaaatggtaggtcttctgtgagtgaggttgaacattgttttgttttgttttgttttttgagacgaagtttcgctcttgttgtccaggctggagtgcagtagtgtgatctcggccccaccgcaacctccgcctcctaggttcaagcaattcttctgcctcagcctcccaagtagctgggattacaggcatgtgccaccacacccggctaattttgtatttttagtagagacggggtttctccatgttggtcaggctggtctcaaacttccgatctcaggtgatctgcccacctcggcctcccaaagtgctgggattacaggcgtgagccactgtgcccggccggttgaacgtttttaacatgtttaggggagatacatacttatctttctgtgaaccatctcatcaggttctttgtgtggcagatatttaaataggaaactatgtagggcctagttgattgcctatatagaatccagtaccctgtctatgccccttcactgcccaagcatgtcacaaggaactgccctattccaagctccagaggacctgctgagtaggtgcttttcaggagcttgaaaagactgtttccaggtctacccccaggggttaatttaattggtctggggagaggcctaagtatcagtttttttgttttgttttagttttttagtaaggagagactttattgaaaaggatttttgcaaggaggggaaaacgactgttgaaatagggaggacactctgaccataaggaggtgtgcaggcatcttctttttcaaaaaatgttttcagttttaaaatttaaaaaaaaatttattttatttatgtatttattttgagatgaagtctcactctgtctcccaggctggagtgcagtggcgtcatctcagctcactgtaacctccacctcccgagtttaagtgattctcctgcctcagcctcccaaatagctgggactacacgtgtgcactaccacacccagctaatttttgtatcttttgtagagatgggggtttcaccatgttggccaggctggtctcgaactcctgacctcagatgatccacccgccttggcctcccaaagtgctaggattacaggtgtgagccaccacacccagccacctggacatgtttaaagaacccagtacctcaggtttaaggagcttttatgtttggtccagactacgtttcagggaagccacaagcagagtttaaagcctgctgagcaccgagctggttcttggtgctaacagggctgagactagtgaaaaagtcatgttgaggcatctgctcagttccagtgtcttccttggcatctgcttgtgcctactgtttgccccctttgcctgtgtgttaaaacagcctctgtctcagaacagtgtctttttttttttttttttgagacagagtctcactctgttgtctaggccggagtgcagtggcacaatctcggctcactgcaacctccacctcccaggttcaagatattctcctgcctcagcctaccaactagctgggattacagatgtgcaccgccacacccagctaattttttgcgtttttaatagagatagggtttcaccatattggttaggctggtctcaaactcctgacctcgtgatccgcccacctccacctcccaaagtgctgggattacaggcatgagccactgcagtgtcctttcttgaggaatggtggtctattaggagaaaaaccaaaagataagacccgagaccaaggaaattgtagtctcaatgcaaagatacaatcagaacattgcacaagggggaaagaaatgtcatgctagtgtttgtattttaattgtctttccttatttagaccaatagtagtaacaggtaacttgggttgcatgcttactaagttccaggcagtagtcgaataacttttaatatttaatattcagaacaataaggaagaaatgaaaactaagaacttactagcaatccggagtttatatttcttgaaaagctcattacaggtagttgctggaatgagatagtttgtgtgcatgaagaagaacacacaaaaatattaaaacatgacatgagtgatggtaatacagcaggtccccagataatggcctttcattcactattgtttcattatcatgttgatgagaaaaaaaaatcaattccctgctggagctactgtctatttggaatttacacattctccagtgtcctcgtggaacttaactcttgtttatatcaattaccttgctgattgatggacaaatcatggaaaattggttttgttatatgtcattttgctcaaagccccagtttccaagaacctatcaatgacattaagtgagaacttactgtagttattccctccccattcaaaacaaatttattgtttagaggatataaggagaaaacattttttccctcagatgtatccttctgtgtgttatgtgtctttttcttttgagacagggtcttgctctgtcgcccaggctggagtgcagtggtgcgatctcgattcacggcaacccccacctccctcgttcaaacaattctcctgtctcagcctccagagtagcggggagccacccgctacaggcgcgtgccaccatgcccggctaatttttgtattttttttagtagagacgtggtttcactatgttggccaggctggtcttgcactcctgacctcaagtgatccacctgcctcagcttcccaaagtgctgggattacaggcgtgaaacactgtgcctggcccgatatgtgtctttttaggcaagcagtgcttatgttgtttgttagtggtaagctgcctttgtagctctgtgttaccttgagtgagacatgatgtgatgtttagttcgtagcatcctcagcactgtcttattcacaatcattgtcaatctaaatgcatagtccttcctgattttttttttttgaaggctttttaaaaaagtttaattgagatatggttacaatggagaaaaaccttcaggaaatataaatgtaaaaaaaatttttaagctttattatttattataaaaacaacatacatttttgtaaattattcaatcaaggaaaattgattcagaaagctatttgaaattcaatcagcatgatcaatgatactttaacccctattcaaatgaaagttatcctaattaaaagtaggtgccctaagaccatttttcagggtgcatttgggttctattgcttccacatcaggaactcataattactgtatggattttataagttgatccaaccatggtatgacttctgtgggtactggtaagtccacatcattgctttgtaataatgtataatcatgactggatgcagtggctcacgctgcaatttcagcactttgggaggctgaggtgagaagattacttgagctcaggagtttgagaccagcctccaacatagggagaccccaacatagggagaccgcatctctacagaaaataaaaaataacaataaaaaatgtgtagtcacaatgttaaagtgaatcagaagagttgctaagttatgatcctttaattgaatcaaagttttttgtttaaattggcttgctgaggagtttccagtaaattaataatgaattatgtaattaatattatgttaatattaaatgttattttaatcaggtcactgccctgcatgccaacttccactgaagtgggaatgtttcacagtgattcagtggccaattagcaatgctcagattcgccatttattgagagattcacacacacacaatcaatcaaacattcacaatgtggttattaaaggctgtaattagggggacaatgaaccacagggatggctcagaaggtcagagcactgatggaccctcaagtgggttggaagtcccttggatgctagtaagtgaggagtggctgttcctctcctggagagccgctgggcggcaattgtcatgctaggaggaggcctcagagttctcatgggcaaagattccaaaggcgccccagacatcatcagctccttgctgtgtgtatgattctccaaaggtctgcccagtatcatggtctcagccagctcttggctccatttttccatcggtggtggtactatgccacagcaggtgttattatctcaccaccttattctattagacgtatgtttatcacttcgaagaaaaacaattttactatgatctcagttgccaggctagtacacatgtgcttatcattctttgtttgcttttcttttgagtcaaggtcttgctctgtcacccaggttgaattgcagtggcacgatcatcgctcacttcagcctgtaattcctaggctgaagggatcctcccacctcggtctcttgagtagataggactacaggtgtgcaccaccacacccagatttttttttttttttttttttttgtagagaagggtctcactctgttgaactcctggtggcctcaagggatcctcctacctcggcctcacaaagtattggaattacaggtgtgagtcactgcagctggccttcacttatcactgtgaggagtaaacagctgcatggtgggcttaatgccatctaacacgagtgactccatgttcagacagtaggatcacaaatgattattatatagcaatgaatggccacaggtacatagactaaggagccacatccctgctcctgggatatcctttagtcaaagggctagaagggtcctggaggtttgccacttctccgtgttgaggtacagagttcctagactaagggactggctgcattgttatgtgtgagtgctagtcatggtgctgcctggcacccacaaatgccacagcagacccatggtcgagggagaggagcaggaataccagttaccatgccggagtaacagttacggcactgatgcaccagttaccatgccagagtaacagttacagcactggtataccagctaccatgccggagtaacagttaccacactgatataccagttaccatgccggagtaacagttaccgcactgatgcaccagttaccatgccagagtaacaattatagcactggtataccagctaccatgccagagtaacagttaccacactgatatactagttaccatcccagagtaacagttaccgcactgatgcaccagttaccatgccagagtaacagttacagcactggtataccagttaccatgccggagtaacagttactgcactgataataccagttaccatgctggagtaacagttaccacactggtataccagttaccatgccggagtaacagttaccgcactggtataccagttaccatgccagagtgactgattttgaccaagacctttgggttgtacagaaggggtgagaccatacctgtcctcaagcatttccaacctagtgtagagaaaaacaggagcaagataagaacaacgtactgaaaaggaaattggatgagggcctggaaaaaggggtaaagtgagctggttgggattggtgagtgccacagcttcctgccccttaacagatcagtgccatggtggctgtggtgtccctggcccagaccttctcagacagggcctgggtgccctttacagagcagttgggaagagaagggaacctagccttgtgaccttttgctccacagacctagtcctttgttgtggtgcgaggctcagtcgtcagcccaccgagtcatgtatgttctctggttgcccctggttttggctgaactcaaaggatggctgtctgtgaggagtactggtactttttgccacttgtgtgccctaactgtggtggatgccattttggggattatgctcagcagtgagtcacgtgagatgcacacgtagcttttcggtgattaatccaggtcaatgcccttacccacatacttctgagatgtactgatgatgactacatttaaagctttttctccattggctagaagttgagacccatttcaacaaaagcacttccacctctcctgaagtgcattgggaaaactggaggccattactagatttacagatgatgggccgtgcttaaataacccatcttagctagactccaggtttcgtcacatattccctacctgttgctgccattgagggctttctctgtgctaggcactaccaaataatgctttggtaactttggtaatttggtaaacttggtaatttggtaaatttggtaataaagagcctttattctaaagtgcaaatctaagtttggggttcagtagctcaaaactctctggtggttcccattatatagagtaacagtcttcattttaaaaaaggtcatgtacccttattagaattttgtgagcaaacaaatatgtgtgtatcgtatgtatgtttatatgtatatcagatgtacgcacattagtatgtgctattaagatactttatattatataatatatactgtataataccgtatattataaagcattcataaaatgaaaatgaagatgaaataaattgcattgtaaatatttaaaactttaaaaaatgcgttactggtacaaaatttttttgtttctaaaaaattattattaatgagcaatgggactgaatttgcttcaccgtttttttaaaatcttgatttaacatttgtcatacagctattttaacatcttacactaaagttgattcttgttttttggagacagagtttcgctcttgttgcccaggctagagtgcagtggcgtgatatcggctcactgcaacttccatctcctgggttcaagtgattctcctgcctcagcctcccaagtagccaggattacaggcttgcgccaccatgcccggctaatttttgtattgttagtagagatggggttttgccgtgttagccaggctggacttgaactcgtgacctcaggtgatccacccgtcttggcctcccaaagtgctgggattacaggtgtgagccaccacgcccagcctagtttattcttttaatagtgcttgggggaggtagcctctaagatgacccccagtgattccccacctcctggtattcctggctcttttgcaaatgtcaattctaatttggtcctaaggtctctctcttgagagtggctatagattctagccctgcccaggaaaataggtttgaatgcattggtcaggtgagacacagagcagcacagcaagacacatgaaatagcagaagtatttttattacttactgatcccagagaggagagagagagaatcctgggccaaaacctttattgggagtccagggagtttcccaagtgggtttcctagggctattatgttaccgaagccaatagttctaattgatgggtttaaagggagcaggcacaagctttgtgggggtcacgctgtgattgagacatggtcactgtagcatattcatctagtacttgtggggtcggggaacaagaggggtgagccacataggccctatgtagctgtcctgtaaagaggtaggggaggtggccatcaagaggcatggtgttaggcagatgtctggagtggccacattgagggattggaagcgggtgtgtttctatgctcccttaaggatatttttggaaacaacatgcttgctgcatacaaatattcaaacattttatctttaaaacaaattttagtactggtaacatttattaacttttttttttttcctgttccctaatttgctacccagcttttacatcaaagctcctatcacaacccttcttgtttttttctttttttccctgagacggactcgctctctttcgctaggctggggtgcagtggccacaatctcggctcactgcaacctctgcctcccgggttcaagagattctcctgcctcagcctcccgagtaactgggactacaggcgcatgccaccatgcccagctaatttttgtatttttagtagagatggggtttcaccgtgttggccaggatggtctcgatctcttgacctcgtgatccacccgcctcggcctcccaaagtgctgggattacaggggtgagccaccacgcctggccccttcttgtttttgtagcttgtcacatgatgaatgctttttaccctgggggagaccaagactttgagtaatagtttgcttttataagccagaatttgttctacacatagaaggataaaactgtcttttctggccaggcgcagtggctcacgcctgtaatcccagcattttggggggccgaggcaggcggatcacgaggtcaggagatcgagaccatcctggctaatgtgatgaaatgccatctctactaaaaatacaaaaaaaaaaattagccgagcgtagtggtgggcgcctgtagttccagctactggggaggctgaggcaggagaatggcgtgaacccaggaggcggagcttgcagtgagccaagatcgcaccactgcactccagcctgggcgacagagtgagactccgtctcaaaaaaaaaaaaaaaaacaaaactatcttttctctctggtttctttgctgttccttttcaggagagaaattacaataggattggtggcctaatgatgtaagtgccaaagtttcattcgaggttttggggtagaatgtttttcaactgtttgcttttatctgagacaaagtgggcaaggaataaaggtagagtggtgagaagggtgttatcccttcctgggaacctttttttttttttttttgaggggggcagagttttgctcttgttgcccaggctggagggcaatggtgtgatctcggcttactgcaacctccacctcctgggttcaagcgattctcctgcttcagcctccctagtagctgggattacaggcatgcgccgccacacctggctaattttgtatttttagtagagacaggatttctccatgttggtcaagctagtcttgaactcccgacctcaggtgatctgcctgccttagcctcccaaagtgctgggattacaggcgtgagtcactgtgcccagccctgggaaccttttaattgtcaactgtgtaggtgttcatgctggcctgcataatagagcgcctgctgtttgattttcagttttctgtagaaggaaaaaaaaaaatcaaaccaacaatagcaaaactcatgatacctcctggtctctctctccctctcctctgcttgcatattctggtctataacaggaaatggaacctcctggagtgaggggaaaatgaccttcacatttaggtttctcactctaaagttatttcttaaatattttagcctgagttcttttaataacagacctcagctctagttctttgaaatgcatgtgggaaaatgtttatcagtgttgaaatctgacatttttttaatctcatgaactccacaattgtctgattattaaagtcctgcttacttgactgtgactaaaattctactttcagaagagtagaatgtacccctaccaaattgaagatcaaataaataaagtggacctggaaaagtaaggcttgccattgtgtgtcaaaccagcccttcccagctgtgggctttgtacttaacggactcagaacgtgaatggaagtacagactctggaacatgtaggagctgttatcccttgccagtttcatgcttcactgtccatctcctggccaaatagagagacaagggtgacattaaaatcatgggtttatctgaattcaaatctcagctgctcacttactaacagtatgaccgcagacaccagcaaaacgtcccactgctgcttatttccaagcctttccaaggtcttctggtcagggcagattcttctttcttgttcctaaatttaaagtttcaagaatttaatgcgtttttttttttttaatgaatttaatgccttttggggggtaggttttcctaatttaactttatttttttaaattttatttttaaattagtgaacagtaaaattgactttttcaatgtatggttttatgaattttaagacatttatagatttgtataactaccatcgccaccacaggacataaaatatttccataatcccaataactttcttcgtgctattctgctctcctgcctcctggcaaccactgatctgttctcatcactattgttttgtccttttgagactgtcacagaaatggaagcatctagtatgtaaccttttgagattggcttctttcactgagcgtaatgcctttgagatccatctaaatgttgcatgtgacaacagtttgttccttttcattgctgagtagtattccattgtatgaatatggcacagtttgcttattcattcatctgttgaggatgtgtttgggttgttgcttggtggggcattggtgattacgaatagagttttaagcatttctgtactgtttttatatgaacataattttttaattcacttagcatatactcttcctctgtctgctgtaataaggtaccacaaaactgggtggcttaaaacaacagaaaattattcttccactgttctggaggccagaaatctgaaattagtatcactgggccaaaatcagggggacagcagggccttgcttcctccagagactccaggagagaaatacttcctggcctctctggcttctggaggccacctgcattgcttggtttgtgaccccttgtatcactctgaccccttgttccattgttttatttcctgttttgtaatcaagtctccctcaggctgggcacccctgagggagcatggctcatgcctgtaatcccagcactttgggaagccgaggagggcagattgcttgagctcaggagtttgagaccagcctgggcaacatggtgaaaccttgtctctacaaaaaatatttttaaaattagttgggcatggtggcatgcacctgtagtcccagctacatgggaggttgaggtgggaggatcacttaagcctgggaggtggcggttgcagtgagccaagattgcaccactgtgctccatcctgagcaagagtaagaccctgtctcaaaaaaccaaaacaaaatcaagtctccctcagtcttcctctttttttgtttgcgtggggacagagtgttgctctgtcgcccaggctggagtgcagtggcacaacctcagctcactgcaacctctgcctcctgggttcaagtgattctcctgcctcagtctcccaagtagctgagattacaagcatgcgccacaacaccctgctaatttttgtatttttgtagagacatggtttcaccatgttagccaggctggtctcgaactcctgacctcaggtaatccgcccacctcagcctcccaaagtgctgggattacaggcatgagccactgtacccagccccagtcttcctcttatagggacacttgtgattacatttatgcccactaggatgacggaggataatgcccccatctcaagattgttaatcacatctccaaagacccttttctcccatatagggtacattcataggttccagtaattaggactggcatatcttttggaggcccattttttagcctactacacttggctaaagacctaggaatgggtcactaggtcatatggttagtatgtgtttaatttcatgagaaattgccaaactgttttacagagtggcagtcatttcacgttcctaccagcacccttgaacgccagaattcctggtatcctcggctgaactggctattgtcggtatttttaattttagccattctagtgagtatctcatcatggttttgcttttccctgacagctaatgaggtggattgagcatctttttgtgtgaaaacctcatatcttttaattttcctcctataacctgcataagtatgaggaagaaaagtgtgaactgaatcataactaaaggaaagaagaacattgctgtcttaagcagatcacgcctttgtcgttatacagtatggtacaataatccattacacatctctttgattcatcttgtctgttaaatttctttataaaatttgtttagttgatgacacacctgactctaatataagagttgaatgttgtatcacttttttttttcctttttctgagacagagtctccctctgtcacccaagctggagtgcagtggttccatcttggcttactgcagtctccacctcctgggctcaagtgatcctcccacctcatcctcctcaatagctgggactacaggcgtgagccaccatgcctagctacttttttttttttttgagacggagtcttgctctgtcgcccacactggagtgcagtggcgtgatcttggctcactgcaaccttcgcctcccgggttcaagcagttcttctacctcagcctcccaagtagctgggattacaggcatgcgccactgctgcccggctaatttttgtatttttagtggagacggggtttcgccatgttggccaggctggtctcgaactcctgacctcatgtgatccacctgccttggcttcccaaagtcttgggattgcaggcgtgagccactgcgcttggcctctatataagcttttaatgaataataaagactctaaattatgcttatttactaccaaataatctttttaaatgaaaaatttgttatccctcccagccctcagccatgacccgaagtatgaaataggcatatctttttgctgctattaggctgtagttcatactggtttagtattgctgttgatcacttttagggacatttaatgatattttatactagatcttgagcaccagctatttattttctcttgaagcagtggtttatagtaatacattgtgctcagttcttttttggttctttgtcaagttcaacacagtagcttctgttgattgagttcttgtagttatgaggggaaattaatgctggtgaccagtatttgagaattaaaaacctctgttcagaaaggcaatgcagagtagaataatgaacggatactataaatgacatatcttgacactgggggtttagtataaataaacagtatttcaatctctggaaattgtaaagcccgttatttaacctaaaaacgttaatggctcagaaaacagaattacatggcatttccttgctaacctcccagagcctatcccctccaaagatgatagggctaaagcctggtccactaagttgttgtcagtcgtacgggctttagagtatgttgacttgatcaaacatttactgtttacaaatatttgcttctagctcatatcctgacacttaaagccacgtgatcttgtagaagtcacttagctgatgaggtaaaactgagtctgtttctccatctgttgaatgaggctggtgatagactctttctttgctctctcccaggtgggtaggagatcaggatgagctgatgtctgtgaaagaactttggatactataaagtgctttaggaatgtatggggttattattttatgaaattgttgattcgtcttcataatttgagatacaagatctccattccattgctaatgcttatggaagattttgtcactttcttaaaaaatattgccaaggccgggcacagtggctcacacctataatcccagcactttgggaggctgaggcgggaggatcacttgagcccaggagtttgagaccagcctgggcaacatggcaagactccatctctacaaaaattgaaaaaaaaataaattatccaggtgtggtggtgcacgcctgtgttcccagctacttgggaggttaaagaggaaagatcacttcagcccaggaggttgaggctgcattgagccatgattgtgccacggcactccagcctggacaacagagaccctgactcaagaaaaaaaaaatacatatatatatatatatatatatatatatatatatatatatatatccaagtataagtatatacttagaggtgggctggtaaaggctttttcattatggatttttcagtttatttcttctaagttttgtcagttgaacagtagggataaattaaagaggaggaaaaaaaatccccatcatccttccttccctccttccctccttcccttcctccctccctccctccctccctccctccctccctccctccctccctcctttcctcactccctttcttttttgacagagtctcactgtgttgcccaggctagagtgcagtggcgtgatcttggcttactgcaacctccccatcctgggttcaaatgattctcaggccttggcctcctgaatagctgggattacagacatgagcacctgacctaacatggttctttttcttttttctttttctttcttttttttttttttttttttgagacagagtctcactctgttgcccaggctggagtgcaatggcacaatctcggctcactgcaacctctgcctcctgggttcaagtgattcttctgcctcagcctcccgagtagctgggattacaggtgctcgccaccatgcctggctaatttttatatttttattagacacagggtttcaccatgttagtcaggctggtctcgaactcctgacctcaggtgatctgcccctcagcctcccaaagtgctgggattccaggtgtgagccaccacgcccggcctacatggctctttttctattcagcttttttggtaggattgaggtagttgtagaggagtgttgataggatagtgaagaaattttaacctttgctaaaaacatgcaagacagtgtcataatgtttaagaatacataaatgttatcattttgtacatgtccttttgaaacttgttttttttattcagcttttttttttttttttttttttttttttttgagatggagtctcactctgttgcccaggctggagtacagtggcgcgatctcggctcactgcaacctctgcctccccggttcaagtgattcttctgcctcaacctcccgagtagctgggactacaggcacgtgccacgacacccagctaaatttttgtatttttagtagagacagcatctcaccatgctggccaggctagtcttgaactcctgacctcaggtgatccacctgccttggcctcccaaagtgctgggattacaggcatgaaccaccgcgcctggccaaacctactatttttaatgggaaggggtttattatagatattatatagctaacagttatggggagggctgaaaaagcaggttcttggttgggcttcatgagtgattcccagatggaacggcctcatagacctgggccactgaggaagctgcagcctcttcaggaattgggaaggtgtcagctgtagaatctgccacaatcaaagccttactgctcctggctccagagccaggtatggtcagccagcaaaattgatatcctgcactctgctcctcaacacccatgaagccagtgcctggacacaggactgctcgtcctgcctcagaaaaccaaatgctttccagccgggcttgcccacagcaacggcagaagcaacagatgtgtgctgggcctcccatctgctttccaaatctcatgtaattgtatccaacttgcagaccctaaatcacatttaaactgtaggtgcaggggaggtggtgatgtgtctgttagattttcagcctccgcactattagaaaagaagggaccctggaaggaggatggaatggctatggattatccatccaccatattcgctccaaattcttaacctgatatgaagatgtatgggtataatgtagggatgctttggaccctgtaattttatgcacacttgggaatgtgcaccagaacatttttctttcattagattctcaaaggggacgatgacccgacagaggctaagcaccattaaccagataagttaagtgatgaagtgcccagattctgaaggcaggcaggcctagatgtgaatcctgtctctgcttcatagctgttgtgagatcttgggcatgttatttcacttctgtaacccttaactttctcatctttaagatagggttctgaggatacttttatggaggtttcatggtaccagcatcctactgggaactgtaactcctgctgcctaccaaatatctataatatctttggcttggcactcaaggtcttctctgaagtagcccaaacatgctttcttgccctactgcagggttgctatgagggtgaagtatagaatgcctctatggtgaatgcctggtatagtgcctggccccaaaaagcaaccaataagtagtcttctcttcccaaagctagtcactgcatgtatgtatgtattcattcattcctcagaagaacatggccaacatgaaaattagggtgtgctgctgccatctctgttaagaataccccttggtggctgggtgcagtggctcattcctgtaatcccagcactttgggaggctgaggcggacagatcactggaggccaggagtttgagaccagccatggccaacatatgaaaccccgtccctactaaaaatacaaaaaatagctgaacgtggtggcgaacacctgtaatcccagctactagggaggctgagactggagaatcacttgaacccgcgaggcggaggttgcagtgagccaagatcgcgccattgcactccagcctgggttacaaagcgagacttcgtctcaaaaaaaaaaaaaaagggctgggcgcagtggctcacgcctgtagtcccagcactttgggaggctgaggcgggtggatcacgaggtcaggagatcgagaccatcctggctaacacggtgaaaccccgtctctaccaaaaatacaaaaaaattagctgggcatggtggctggcacctgtagtcccagctactcgggaggctgaggcaggagaatggcgtgaacccgggaggcagagcttgcagtgagccaagatcgcgccactgcactccagcctgggcgacagagcggactccatctcaaaaaaaaagaacacccttggtagctcctacttgtgctgcagaggtgaacttggctatcacttcctctgttcccactgcatgctgtgctattgctgtgctgtttatcacagtggtgtttactgtcttatacttgcctctctctcatctcttctttttttttcttttctttttttttttttttttttttgagatggagtctcactctgttgctcaggctggagtgcagtggtgcaatcttggctcactgcaacctctgtctcctaggttcaagcaattctcctgcctcagcctcccgagtagctgggattacaggcatgtgccaccacaaccggccaatttttgtatttttagtagagacgggtttttaccatgttggccaggctggtctcgaattcctgacctcaagttatccacccacttcagcctcccagagtgctgggattacaggcgtgagccaccatgccaggcctcatctcctcttaaatgtctttagagcaaagattgtgtcataaccccggcacctagtatcatgcctattacatagtagattttcaataaatgttaaatgcatgaatgaataatgagtaaagaaactgggtaatgtttttagcttggaggagagaagcctaagggaagatgtgtttgctgttttgaaaatatttattgtcgctgggcgcggtggctcacgcctgtaatcccagcactttgggaggctgaggcgggtgtatcacctgggtcaggagttcgagaccagtctggccaacatggtgaaaccccgtctctactaaaatataaaaaaaattagctgggggtagtggcgttgcctataatctcagctacttgggaggctgaggcaggagaatcgcttgaacccaggaggcggaggttgcagtgagccaagattgcaccactgcactccagtctgggcaacaagagtgggactctgtctcagaaaaaaaaaaaaaagagagaccaggcgtggtggctcacgcctgtaatcccagcactttgggaggccgaggcgggtggattacgaggtcaggagatcgagaccatcctggctaacatggtgaaaccccgtctctactaaaaatacaaaaaattagccaggcgtggtggcgggcacctgtagtcccagctactcgggaggctgaggcaggagaatggcgtgaacctgggaggcggagcttgcagtgagccgagatcgtgccactgcactccagcctgggcgacagagcgagactccgtctcaaaaaaaaaaaaaaaaaaaaaaatttactatcatgtaaaggggagttggtctcaccctacactgctttggaaggcacaattaggagctgcggatggaagtcacaaaataaggcacatttggactcagtatgaaaagagctttcagataatgagagcaatcaagtaatggggggggcttggaagccagtgattattggtcattggaggtattaaaggagaggcaagataggaagatatagatggggtttgaataccgtgcggggcttctcagcactcttccttttctgagtgcttttaacaagcggactagggaatagatagggcctctgctctcagggagattattgtctgctcagggagagaagatatattcaggtgggaaagggcaaagggtgttaggaatggcttggctaggatagtcagaggagtacgtggagtaaggcaggaaagcatgtttgggcttcctcaaagatgaccttgagtaccaagccaaagattttggagatatttggtggacattgggcattatacatacccagtaagatattagcaccatgaaagctccacaaaagtgtcctgagcgcctagaacagtacttggcacatggtagatcttcaataaatagttgttgaaggaatttgttaaaatatcagagctatgatttaagaaaattattctgtaatctgaatttaggttgggagtggaaaggagtacccttaagtaggacatgagaagagcctgaagaaaggcagaggacaccagtaggcatcttggatgtgggattggtcagaggggagagaggtaaaaatgattccatgactgtgagtctggcgactagaaatgggggtgacattcacagagtagggtggttccctgtagttcctccttgtgcagaaggtgaggctttgcttgtcgacctgcttcagtagtagcattgacagaacagtctctgtgtactctgtcccctcagtgctttctgcatatgtgttgctcactcatcactatctgcatgttcgtggtctctggaaagaatcaactataatgatcagaataattgcctggtaggacgtatttcctttgagttcagcaagacgtgccccctcacatggtgttcctgttcattcataaggctgtaataatgtatgagttaggagacccttttgaccaattcccctctgttttccatcttggaaaaaccagaactctgttttcttgagcaaatgacgttgccaccagccctgaagctccttttcctgggtttgtaggggttggtggaatcctggcagtctgccgctcttcctggcctccagagatcagggctgtgactttccatctgcagatggcagttctagctgcgaggttggtggccgaggaggacgaggacacagctcagggcctgtccttcaagggcttccgtgtgcagcagcagcactctgtaatatcatagatgaatttttgtcaaaacacagagaaaagttgattacacttctcatttattaaaaaaaaatgacttgatagcatagtagatggccccttatgtaagccacttagtattatttcaaaggaagcatgtctgtgagaaaaggggcaaccacttttctcatagagaagaacaggtttttaaatgaaaagatcaacaaatccaaatgctgtggtatttatactgatttagaaaggcagttgactttgggaggctttgttttctcatttcccttttctccttgacatttgacagacgtggttagcagagagctttctcattcggttttcctggagagagctctgcctcttgggcttcctgcatttgtatggaagttttaattttttttttttttgtcaaatgaaaggttgccatttcatttgttcagatttcccacacactgttgcagcaatctttagatttcaaattggctaattcagtgggtcacttaattcttaacttttacaacattttgagtctaaatacagcaaaattggtgcctttttcagctatttttcggcgttgctatattccaagccactgagctctgttttactctgacattttctcttcacttttgggattctgctcactgtgtttaaggcagctcgatagcattttgccaaaaaagagaagttagggctagtgtgagttgaggggaaggggatgtttctgttgttgctccttgctgagtatcttcagatatctaaaagaaacttgtaacacagcgtcagcctgacactggcctttgcagcatcagccttggttgactgtgttctaatagggatgcctgatctgtatcctctttaacttggctataagaaggttttggagaatgtatgtctgagggtgttttaaaagaaaatggaaacaaagctcctttttgccttgagctcatggtttggaatttgggcatttggaatccttcaagccctcctcctgggcagagctggagtccccttagggcactgcctgtcatcttcactacacagctgtgctccagagcagggagccgatggaaagggggacccagaacattccattctgcagaattcccttccagccgtctgtgagaaggcagtttgggacccttttagaagtttgctttataagtgaagaacctgaggccggctgtgttcatattctcagaacttggtgagaatgaggtactttaagataggctctaagatcagcagcatcagcccactcgggaagagctcctctgactcctggaggagaaagccagatgggggaagcattaagtcctgttttcctattgaaaactgaaattggccagccacagtggctcatgtctgtaatcccagccctttgggaggccaaggtgggaggattgtttgagcctaggagttcaagaccagcctgagcaacacgatgaaacctggtccctgtaaaaaatacaaaaattagctggggcatggtagcgcatgcttgtagtcccagctactagggaggctgaggtgggaggaccgcttgggcctgggaagcagaggttgcagtgaactaaggttgaaccactgtactccaggccttttttttttttttttttttgagacagagtcttgctctgtcacccaggctggagtgtagtggtgcgatctcagctcactgcaacctccgcctcctgggttcaagtgattcttctgcctcagcctcccgagtagctgggactacaggcacccaccaccacgcccggctaattttttttgtattttgttatagagatggggtttcactgtgttagccaggctagtctcgatctcctgaccttgtgatttacccgcctcggcctcccaaagtgctgggattacaggcatgagccactgcgcccggccaggcattttttttatgtgtgtctcaaataaaaagaaagaaaaccaaaattttacctgaaagacgagaaagttgatgaagattttgagaaagtgaggaagcaatggcccctccagggcacacccaggtgctgtcccttcttttctcctcagttctcttagctataaaatggggcttataataatcccttccttgaagagatgttgttaatagtacttagatgatttgctaacttatatcaagcacttactctgacccaggtatcggactgggtgcttgacatatattatctctattgtgttttgcagagtggctaagattttttttttttttcttttttgagacagagtctcgctctgtcacccaagttggagtgcagtggtgcgatcttggctcactgcaacctccacctcctgggttcaagccattttcctgcctcagcctcccgagtagctgggattacaggcgtgtactaccacgtctggctaatttttgtatttcagtagagatggggtttcaccgtgttggccaggctgctctcggaactcctgactccggtgatccacccgccttggcctcccaaagtgctgggattacaggcatgagccaccagagacggagtctcactctgttgctcaggctggaatgcagtggcgcagtctcgactcactgtaacctccgcctcctgggttcaagcaattctcctgcctcagcctcccaagtagctgagattacaggcgtgcgccaccaagcccagataattttcatatttttagtagagacggggttttgccatgttggccaggctggtcttgaactcatgacctcaagtgatccatccacctcggcctcccaaagtgctgggattacaggtgtgagccaccgcatccggccccaatttattcaactttggaagcgttggttgtgagatgtgcagttgggtgttgtcatggagaagaattgggcccttcctgttgaccagtgccggctgcaggcattgcagttttcggtgcatctcatcgatttgctgagcatacttctcagatgtgatggtttcgccgggattcagaaggctgtagtggatcacacaggcagcagaccaccaagctgtgaccatgacctttttttggtgctagtttggctttgggaagtgctttggaacctctttcggtccgaacactgagctggtcattgctgtttgtcgtataaaatccactttttgtcgcacatcacaatctgatcaagaaatggtttgttgttgcgtagaggaagagaagacgacacttaaacatgattttttaaaaatttttgctgatgtgggacccgcttaacttcccaatttgcttcaaatgccaaatgatcatagaatggtcaacattgagtttttcagcaacttcttttatggttgtaagaggatcagcttctgtgattgatctcccaactggtcgttgtcaacttctgatggccggtcattgcactcctcatcttcaaggctctcgtctcctttgtaaaacttcttgaaccaccactgcactgtacgtttcattagcagctccttggccaaatgcgttgttgatgttgcgagttgtctccagtgctttacaatccattttgaccttgaataagaaaattgctcgaatttgctttttgtctaacatcattttcacagtctaaagtaaacataaacagcaaggaataagtcattagcaaaaaaatgtaaagtgagaaatgcccattaaaataatgtataacataaccacatttatttaagaatgtactcgaatatcaaatgacaaattccaacagtgtaaaaactgtgattccttttgcaccaacctcatactagccaggcatctttctactgaaactggctggagaccatgtctcagtggtggagccggtataggaggcttcacatttcttcccctaggacacgctgtcattgtttaggtttcttgttttgttttttcctgaaacagggtctcactctgttgctcaggctggagtgcagtggcacagttacagctcactgcagctctaacctcttaggctcaagtgattgtcccatctcagcctctcaactagctgggactacgtgcttgtgccacacatttaggtaatttaattttttttttttttttttttttttttggagacggggtcccactacgttgtccaggctggcctctaactcctgggcttaggcaatcctcccacttcagcctcctaaactgctgggattacaggcatgagccaccacacccagccagttgtttagttttaaagatttaacctggttgaaatgtggctagtccccttatgcttgggtcacagaccaatttgggttaactttgccattgccttgcctgcagatcatggtgctgttgggatgtcattttgctgtaccaagggtaaacagtagctccctccttaacatcagtcctttagtgtaggacttctctattaagagctgggacactgttggccattaggattcctgttccttttgggtttgtaatagaagctactgtccccctgatcattactgattgaaacaagaaatctgttgttcctggatttctttcagttatcttaacatagacccttccaagtcttacagatgtcaagggtttttgaaagtaggatgtattctgatctttttcaagtggctacatcactgaccctcataaaataacggaaaatattgggagatgacttttctgcttaaatgttaggaaactaaattctcagtatactgcttctctagttgttaaggaagaaaatttctcttgtaaactttttgggagactagatttatttcctcccccactttttttttttttgaaatggagtctcgctctgtcgccaggctggagtgcagtggcgcgatctcggctcactgcaacctccacctcccaggttcaagagattctcctgcctcagcctcccgagtagctgggactacaggcacgggccacaacacccagctaatttttgcattattttttggtagagacggggtttcaccatgttggccaggatggtctcaatctcttgacctcgtggtcagcccccgcaaagtgctatttcctcccccgcccctgcttttttttttttttttttttttgagacggagtctcgctctttcgcccaggctggagtgcagtggtgcaatctcggctcactgcaagctccgcctcccaggttcacaccattctcctgcctcagcctcccgagtagctgggactacaggcgcccaccaccacggctggctactaatattttgttttcggtatgtttttgtatttttagtagagacagggtttcactgtgttacccaggatggtctcgatctcctgacctcgtgatccacccgccttggcctcccaaagtgctgggattacaggcgtgagccactgcgcccggcctatttcctcccctttttatgaccattcacagcctttggcataccattaaaatctgatcattgacttctaggtgggagaatggcatctctcttttctcctcatgataaggacttagtctgtaaaccttccagtccctccctaccctgaagcctcccatggtcttttctctctcccttgtgaaggaaaggtccctcttttaaagcattattcagaccggaaggaggacaaaatcaagacatgctgaaaaacccctgttttaatcaactccccttttaattttttcaaaagtcattattaggcatcgaaagctgttgaccttcatcaaacaatgagcacaggatttcttttccgcatcacgcgtggtgccactccagtgctatggtgtgatcagaacacccacattaataagaacattacttctctgaagtaatttgaatcttcatttagtaagactaaccatttcttcaaattttgttttttagtatacaggaaagttacaggttttttttctcttttatttgacaaatgaaagtgattttatattcatcacattacaaaataaataaatgctcattatttaataagaaaattcacatctgggctcagtggctcacacctgtaatcccagcactttgggaggccgaggcgggtggatcacctgaggtcgggagttagagaccagcctgacgaacgtggggaaacccccgtctctactaaaaatacaaaattagctgggcttgctggcgcgtgcctgtaatcccagctacttgggaggctgaggcaggagaatcacttgaacctgggaggcgaagtttgtggggacccaagatcacgccattgcacttctgcctgggcaacaagagcgaaactcccagctcaaaaaaaaaaaaaaattcacaagtacagaaagagatgctgaagaaggtaacagttacctagaaccccacccccagagataaccaccttgtggtaacatttatttctctgccgtagccactcttgtctgaaggagggttcatagtagataggctgtttttgttcatttgcctttaaaaatatatatattgtaaatattcttctgtgccattgaatataaaacatggtaatttttaaatttgtgtggtgtgcatgtgtgtgcacttttgggaaacttgtttatagtgactttcaaactgagcatttacaaagaaattaacagttgttgggtgtgttgaatgtgcagggttttgctgaacactttacaggggtgtctgatcgagtccatcacttcctgtgggcttgtgcaatagcctccttactgatactcctgctttcagtcttcctcctctgctagttatttttcatatgaaaacctgaataatctggctgggcgtggtggctcacacctgtaatcccagcactttgggaggctgaggcaggtggatcacaaagtcaggagatcgagaccatcctggctaacacggtgaaaccccttctctactaaaaatacaaaaaattggccgggtgtggtagcgggtgcctgtagtcccagctactcgggaggctgaggcaggagagtggcatgaacccgggaggtgcagctttcagtgagccaagatggcgccactgcactccagcctggtgacagagcgagactccgtctcaaaaaaaaaaaaaaaaagaaaaggaaacctgaatagtctttcaggaatgcaaatgagatcatgttgctcctctgcttaaaacctaatagcttctccttccatgtcacaaaaaaagccaagcatataaccaagatctggcctaggtcccagcatcgcttcatgtatcattggcccatctttctgtttcttcagtatgacatttgtttcagcctcagggcctttgcacttctttctggttcccctgccctgggacatttggataattgctttttttttttttcatttcaggttctagttcaaattgaatccaagtgaagtgaccccataatacatgttaattgtggaaaaaaatttaaatttagcaaagtaaagaatagagcatgtcactctaccatccactcaacatttttgtggttttttttcatttaattaattccatttattcattctcttaacacaatgcctacaatatgccaggtatattatattggtgttaggttgggctataatattaaaaaggacagtcatggttcttgcccttgaggtctgttagatcaggaattcagaagtgggttagctgagtggttctagcttgtggtctctcatgagattgtagacaagatttcagctgggacttcagagtcatttgaaggcttaactggggctggcaggcctgcctccaagatggctcactcacagggctggcgagcagtgctggcagttgacaggaggccacagttccttgccacacggacctctccacatgcttcttgcgtgtcctcacaacatgtcagcagctttccccagagcaagtaatccaagagatcacaaggcagaagtgacatgtctttataatcacagatgctaccctgctgttctgcagtatcctgttggttccccagtctaccctattcagtgagggagggcactcactcagcaaatgtgccgggaatcagtgggggcattttggaggcttgccactcgctgcctgtaaaatgagcatcataatggcacgtgtaccgctaccaccccctgccagcacaaggggaacatgaacctaacataatgggggcagggaacgggcagaagaggcttcccagaggagacacttaggcagagactgggccgctgagtgggcgtttgggaggtgagggtgttccaggctgaggggaggtttgtaggaaggtcctgagtgggaaggcactgcctgcagtagcgcatggcctggaggagacagcaaggcgggccagggtcagagaggccaggacacacacatcactgtgtccttgagggagatctttcttctctaggaatatagctgagcttaccccagaaaccaggggagaaaataggagccgagttttctggagtgcgtttcttctgtgaagtgaggtttgtgtgtaggaggcatctgtccagagcttttcaagttttatttcattattgctggagggaactagctctggtcctgttggttgggactgaactgtattgctgaccctttcccatgttcaaagttcccgcttccattgggggactgtgctttgtgcttcttcttgtaacaatgtgtttagcttatttagcagcatcagattctccttctgatatatgcattcgataaacctggacacctgtgcagatttctttttcgtggtggcactgtgttttcttttgcttgttatgcgtaaggtcagatatgttgtgttttgggtccctgacaccttgggcttggatgaataatgtcacttaagaggaggcaagtaaaaggccaggcacagtggctcatgcctgtaatcccagcactttgggaggccagggcaggtggatcacgaggtcaggagttcgagatcagcctggctaacatggtgaaaccctgtctctactaaaaatacaaaaattagctgggcgtggtggcgcatgcctgtaatcccagctaattgggaggctgaggtgggagaatcacttgaacctgggaggtggaggttgcagtgagccaagattgtgccactgtactccagtctgggtgacagagcaagactgtctcaaaaaaaaaaaaaaagaggatacaagggatacaagtagaatttgtagtgtgctgattaaccaaagacaagttcctccacccttttctttttggccagagttgatcattttcagaattcatcattttgtcaagatgatttttttgttgttaaatatgaataatttgctttcctctggacttctaaggcttcctgaaattacatgcaaacatttgtgcagtctcatgtttggttattggtttttgggtttgctatttttgggcgaggaggtccatatccttcatcagcttctcaaggggttttttcagaggtacaaggggaggctttggtttggttatgacagtgctacagccagcaacccgggggccacctgggtgctgctcccccacttcaaaacgtgtagctagcaggatggaaatcctgtctacatggaaatccttgtggtgttggataggccatgattcatttccctaagcctcaaatgcttctattgtttgtagtttttctcccagaatcttcatgatccatttttgtacattcttatggccttacgataaattcctagaagtggaatttctacatcaaaagaatagaaacttttaaaggtttttgatacatattgccagttgcccttctggaaggtctactgggtacgtcagtgtacctgagtgttaacagtgacggatcagtattcatttctcttataaggaaggaaatgaaagtcatttggtaacgtagaggcacaattagacctgacagcctttgtgtttctcttctgttctttaggccccccagttccctttgctgctttcttctttatgccacagatttaatgcttgaacacatattgaaattttggaaagttactgtgaatctaatggggcataataggcaggttttcttaatcctggcaatgaccaaactaatcacttgtctgtggtggcttggtggaaaaacggtttgtcagcagaatttggtaaagaagcagtcacaaggacagggtgttggtctcatatttgagtgcttccctgaggaaagaaaagataaagggaagaattgggtgaattcatcagactgtatttggcagatggagatgaagtgggtgcaggtcatcgcccacgacctgtttcccaggcttgcagagaaactgctgctcaggagcttgtgactgtgagggccccgggccgtggcatgcgttggtgcgctctcaagaatgcggccatggcactcacagacacataccaagaagcctcggcccccagtgcccccgccagcctgctcaggggcatgcggatgactggagcctggaaggcgggtcttgctgggcaggacagatgccttactgtcaggacagatgccttactgtaggcccaggaagagatccatgaccgcagacagacttctgcgtagggccctgaggaaagagtggtaaacatgcagtgaagggcggccccaccactggtggcttctgacagggagctggagggtgcaggtactggatgtgtctcattgggatacaaatgagtgtgccccgtggttaggaagatgaggaagtgtaggcacttgcaggggccttttcttttgacttagtgagttcccaccaaacctggccttgtctgtttttgatgccttaggacttggggacaaggccacagcctgtgaccccagcatcatctccccccagggccttgccaccctctagctttcatccttgcctcctcctctgccctctctttcttgtccgatacagtcacaagtgcctagaataaacctcacaccacccactgctctgctgtcagggctaccaccccggccccaccctgccttgccccggctctgatctcaaagacttcccagcctcctgttgccatctgggtctgtcctcctcctgctagcagagagaccctcccttagaaacttacatcagatcttttcactacccagtttcctgtccctcgatgggtacccatctcagttagagtaatgttcagcttctctccacagcctgcgtggtctgggcctggtttccctctcgaatttccctcctgtcactccctttgtttactgccagtgctttttcctcttagggttccctgggccctgcccttcactcagcttctggtgcctggctctttcagacccatgcaggccccagctcacatgacatcttttcggaaagaccttccctgatggcccaggccacagtacccacaccagcatcagctctttgtcctcttccccttttcatttctttgcagctcatgccatctgaaactacctcattcaattattgatagatctgtttggaattccaggagtccctttgcgatcccattcttctaaagattcacatggcctcagaatgccatgttacagtggagagtctgacttcttgttttctgagacggagtctcactctgttgtccaggctggactgcagtgacaatctctgctcactataacctccgcctcccgggttcaagcgattcttgtgcctcagcctcccgagtagctggaattacaggtgcctgccaccacgtctggctaatttttgtatttttagtagagatggggtttcaacatgttagccaggctggtctcgaactcctgacctcaggtgatccacccgcctgggccctccaaagtgctgggattacaggcaggagccactgtgcccggcctgacctcatatttgaataccgagttttagttctggaggagctgcaggttttatgaaaagggaacacatttgattcctcagagcagccacaggccagctctctgaagtaaagtgcacgtgtgcatgtgtgtgcacactcacacacacgtacacacacattcacaaataggacatctcttttaaacagaaatggccacctgcatttgagaaaataaagtttcatgcagaagaaagtgacatgttaaattcaatcatcaagatttagactggtgggaattctgcacaacaaatgacttggtttaattaacatggaaattgcgaggaaaaaaatgaagtggaacctatggatttaaaaattaggaaattttaagatttccatcgtaatttttttaaaacaatatattttacttccaaaaccctgcgttttcacatggtagctatctgctggagctgagtagccgctgctctcttgaacagcatcacccagatgggagagcccccttccccccaacccccatacactcctatgtgtacaacttcctgaaccctgtaagcattagagcttgcagcctctgctttttctgtttccttcttgatgggaagactggcagcaggatttacttggttgctacatttgtgaatttgtaaaataattcatgctctgctaggtctgtaacttgggaggcttggtgtgcacgggcatttagcagcaactcagagcgtatggaagactgtcactggcaagagcaaagtccccccaggacagagccagtgacgactagctgtgtatcctcagtctgatggcggtggaagtgaggcagcaccaaggagcagaaacaggaagtttccactgatgaccaccctgcccccagctaggctgaaaggcctccccagagcccttgcatcagcctggctttgcactggtctgggggatgttgcttgttagagccagtgaagaagaacggtagtaagttacctgatggccaaggctctgtctgaccctgtctgctgtcgtgttcctggcacagaatagtctttgttgaaggaacgaattagtgcatccttccaagccttggaggacctgtctataataggcccactctatagggtctttgtgagaattaaattaaaacccctatgagaaacctaactagagacaattggaagtaacttaaatatttgttcattgggaacagctacataattgtggctgtcattctgtacaacactctgtggctgttaaagagctagaggtagttttatgtggattgatgtgttcaatgtgttcaatggaaaagcaagggtaatataatcccatttatactacagagaaaaatcgggtctgtaaatatgttgagaaaggtctgtcgatagtggttatcttttgagagtggaatggatcggggtgggtatggcctggggacgtgagggggaatttttcactctttatttcacatacatctgtcattggcacagaaaattaagcagtaaacctaaagaaacagaatagtgcttgttgtatagttagatcaataacttgtaactattataaaaggtagttataaagttagtaagggccaaaggtctaactagagtaggtcggttatagaggaaaacagtttaatcagttgttgtttaacttttatggaatgcaacttctttagctttaatttggagagccaaactatggccctagtcttttttttttttttttttttttgagttggagtttcgctcttgtccaggctggagtgcaatggtgctatcttggcttactacagcctccacctcccgggttcaagcgattctcctgcctcagcctgccaggtagctgggattacaggtgtgcaccaccatgactggctaattttgtatatatatattttaagtacaaatggggtttcaccgtgttggccaggctggtctcaaactcctgacctcaggtgatctacccaccttggcctcccaaggtgctgggattacaggtgtgagccaccgtccccggcccctagtcttttattgtattgtattgtattattttttagtcaggtttattgaggtataatttacatatcataatattccccttctttattatacagttctatggactttgacaaatacatacacttgtgaaattgccaccccttttgagatacagaacagttctatcaccccctagaattcccttgtgcggcccttttgtagtcatcctttctctcttctcccagctgctggcaaccctgatctgtttttttgtccctgtagttttgccttttccagaatgtcatatcaatggaatagtacagtctgaagcctttgaatctggcttctttcattcaatataatgggtgaggagtcaaccacgttgttgcatgttatccacatttcctccttttgtgtctctgagtagtattctcttgcatagatgtaccacagtttgtttatccattcaccagctgaaggacagtgctccagggtcctagagcacagaactctggctttgttgtctttatttctaccagttgtctctctctctgtctctctctctctcttttttttttaaaccctagaagattattaagatttataagactgggtatggtggctcatgccagtaatcccaatgctttgagaggccaaggcgggaggatcacttgaagccgggagttcaagaccagcttgggcaatgtagcaagaccccatctctacaaaaaattgaaaaattagccgggtgtggtggtgcacacctgtagtcccagctactcaagaggctgaggcaggaggatcacctgagcccaggagtttgaggtgatagtgagctatgactgcaccactgcactccagcctgggccacagcataagcacttgtctccaaaaatgtttaaaagattgacaatacagtcttcttcagagtctccataggaaaggagcggcacgaaatgcaaattatttggaggttttggaggtttcaaacttttaattacttggcacatatagtgcttactgtgtgcaggcactgttctaaatattgctttcaaatatttaaaagtgcttagaacagttacagcacatagtaaatgctatatatctgcttgttaaataaataaaaatttaagtttccaaataatctgtatttcacataaaagagaagagatgtgggacaatataaataggcaggagaccagggttgtagacccggtactatcacattcccagcctaccccttaacctagtcccttgggtgaattaccgactctgggtctcacttactaacatgaaaggaggttcataatctgaatcctcctgaaggaacagataatatctcaactcttaatagttgaactctaaaatttggtcagtataaaagtaatgttataaaatgtgtctatatctgtttattttacattgtattgggcctggataattggtttcttcctttttacatgtatataacatcctattgggatctgtattaaaagtgtactaaaaacattcaccacatggtggtgctcccttcaaaagccaaactgaaaattgtaggccagcattgagtattaggcatggagttgataggggcagctgtatgtatgtatgtatgtgtgtgtgtgtatgtatgtatgtatgtatgtatgtagagatggggcctcactatgttgcccaggctggtcttgaactcttggcctcaagtgatcttcccacctcagccttctaagtagagtgccagtttatattctacatttgtgctttaagttttttttagggaagtagggtcctgtcattttattagcttgataacttatacagatgccaaaatacaggaacatttgttctttcttaggcattatgacatattcatgtacattaactgatgttatactttttaagtgttccaaatatcttcactcagaagtttatgtgcttgacaggaaaagaaaaaatacatctgtaaggaaagtatcataggtatttatccttcaaaagctgatgtttttatttatttatttatttttaacctaatgtgttcttaagtcatactgggatagcagcagtacccagcctaagagaagctgcagtatagtttccttggtcaaatgactttttctttctttctttctttctttttttttttttttttttgagacagagtcttactctgtcgcccaggctggagtgcagtggcagaatcttggctcactgcaacctcctcctcctgggctcaagcaatcctcccacctcagcctcctgagtagctggggctacaggcacgtgccaccacgcccagctaagttttgtattttcagtagagatggggtttcgccatgttgaccaggctggtctcaaactcctggcctcaggtgagccgccagccttggcctcccaaagtgctgggattacaggcatgagccactgcgcccagccaaaagttggtgtttttaaaaaatgcttcctggtaactgccttagggagaataatgttaacatttcagttgtgattctcttgaagcacagtatttccctgccttttagatttgaaatggatacttctaagcagttgtgactggctggatttcagtcatttacatcggaacactggtctggtcagctcacctgcatctttggtagagagatatctcccaaacatacactctccctgaaggattttcatccttcatatgcttatcaattcccttgccaagtatttactgtttgtccacatgagtacaaggcattgagcttgtgctactgtagactcacagatggtcatgattttcaggaattgaatagagaagatgaaacactgagacactggattcaaatgctagaccttactgggttgacgttagtaatagacatgtgaagaattatagcggttgagaggaaagagacatctcctcactagggtgactggtcagggaaaaagatgggagtggtttttggtgggagaagaggaggagacgggatctgggcatatgaagaggcctggggtactgaggtggaatttcaccacaccccaaatctgttgaaaagaggaaagtgtacaggcaggagacacagaatctggccagagtgaatgtcctgagcaagggcatgggaagaggaaaacgcagggcacagggattaggtgaggatccaactgaatgcttgcccaaggggcttcactgtcgaggattttgactgagatgggggcaaacatgatagacaaactttagggacaatttagcattgtcttcaaacacaggtatgagggagacttttgctggtgataggacagattatcctgaaaattgacctgacaaaaatacttagacctgatccctaaaatataataaacatctttttaatgaatagctgaacttgcaagaaaaaaggtaaatccccaaggcctataaaataaaagatgagctggccgggtgcagcggctcacacctgtaatcccagcactttgggaggccaaggcgggtggatcacctgaggtcaggagttcaagaccagcctgaccagcatggagaaaccccatctctactgaaaatacaaaattagccgggcatggtggcacatgcctgtaatcctgctactcgggaggctgaagcaggagaatcacttgaacctgggaagtggaggttgcagtgagctgagatcgtgccattgcactccagcctgggcaacaagagtgaaactccatctcgaatttaaaaaaaaatttaaaaaataaataaaaaataaaagatgagctgaaaataagaaagacaagccaaaactgtaaacgtcttggcattgtttgctaatttcagtaatcaagatgcttttttcccccaatgttttgtttttgttgctattgttttgaaatagggtcttgctctatcgtccaggctggagtgtagtggtgcaatcatggctcactgaagccttgacctcctgggctcaagtgatcctcccacctcagcctcctgagtaactgggactataggtgtgggccatcatgcctggctaactcttttttttttttttttttttcattttgtagagatggggttttggggttttaccatgttgcctaggctggtcttaaactcatgggctcaagtgtccttctgtttcagcctcccaaaatgctgggattacagacatgagccattgtgcccggctccccaatagttttattgaggtataactgacataaaataaactgcacatatataaagtatacaatttgataaattatatgtatatgcccacaaaacgatcaccacaattaagatagtgaaaagcccatcatcctcagaagtttccttatgattctttgtaattcttccctgatttacctccttcccggtccaatacttacctgttttctgtcaccataaattagttttcatttatataaaattttagaaaatacagtcatatactatgtactcttctttgcctgacataattatcttgagattcatccatgtttttggatcaataatttgttcctttttattgctgagtactattccattgtgtggatggaccataatttgtttattcatctgctgatgggcatttgtttccctttttgggctaatacaaataaagctgctagaacacatatgaacatatcttttttacttttattttttgcctttttcctgcagtatgagcaaagctttgtgtggacatttgctttcttttcctttgggtaaataggagcaggatcgctggtcatatggtagctgtcgatgacacttgagtcttaagggctgctgtttggggaactggagacataatcttgggcctatgagtagacagggacttggaattcagactgccctataaagctaagatcattgattggctacactttgagcaaaatgatagactagaaagaataagctgttggcagaatatttaaaaaagaaacttgccaggcacggtggctcatgcctgtgattctagcactttggaaggctgaggtgggcggattgcctgagctcaggagttcgtgaccagactgggcaacatggagaaacctcatctgttaaaaaaacaaaaacaaaaagcaaacaaacaaacaaaattagccaggcatggtggcgtgcatctatagtcccagctacttgaggggctgaggctgaagtatctcttgaacccaggaggttgaagccgaagctgagattgcaccactgcactccatcctgggtgacaaagtgagaccctatctcaaaaaagaaagaaagaaaggaagttagaaagtgggggagggagggaaggaggaagtgaggaaggaaagaaaggaaagaaaacaaagagaaagaaacttgtctgatttggtctgcactttgagtgagaggaaacaaaaacctcccgagataacttttattctaagcatgccttcttttaaactttgtttgaatttacctggcctctgtagtttgtgaaattccaagaagagacattattttagagagatactaggttgctagagttcctagattactacagttcctagttagctggcagaagtcaatgcatatcctcttggactatatctatctttttctcagtcttaacaccagattcccaaagataaagcttctccaaacatgatctcacaatccaaaactaagaacatgagaaaacaaacaaccttgcatcacagagcaggaaaatgaacagtagaactatagtactttatagctttagatataaaaactgtcagattcagaatataaaatactggtttaaaaacatttaaagaaataaaatgtgaaatagaaaacaagtaaggactaaaatcctatgaagaaaaatcaaataattgaaaaagaactaaaaaagaaatgaaaactacgatcagtgaaattaaaacttcagtggatgggtttaacaagttagacacaactgaagagagatttagtaaactgagggataaagctgaagaaattatacaaaacgcagcatagagagacagaagtctaaaatataagcctataaggagagagaaaagaagtcaatagagataacagatgagagacaatatttgaggagatattgctaaataatttccaagaatagtgaaaaacaagaatctttagattcaggaatcagagcaaatcccacgtggaattaaaaaaaaaaagtcttctccaaatataaggccaatagaacaccaaagacaaaaataagatcttaaaagcaatcagagagaaactgattacctcccaaggaaccctattaaactcaaaggagacttctctacagcaacgatggaaaccagaaagaagacagtggaacagtatcttaaaagcgctgagagaaaaattattgtcaacctagaattttaaacttagctaaaatataatttagtaatgagagcatgataatgacattttcagataaacaaaaactgatgtctccagcacggtctcacaaaggaacttttatactttcaaaaaagagaaaatgatccaaaaaggaagaatgtctgcaatgcaagaaagaatagtgagggaaaagaaaaagtggaatgaatagagaattagtcatgtggtatcacatggcagctcactcaggaatcataaagctggccttgggataacagagctaaactttagagtcctgagtcctgttaatactcaatcctctgtgaaattcaattaagtgagcttcaagttaacctaaaaagctgtggtgaggctgggcgcggtggctcatgcctgtaatcccagcactttgggaggccgaggcaggcagatcacctgacgtcaggcgttcgagaccagcctggccaacatggcgaaaccccgtctctactaaagatacaaaaattatctgggcgtggtggctacttgggaggctgaggcaggagaatcacctgaacctgggaggcggaggttgcagtgaccagagatcgtgctactgtactctagcctgggcgacaaagtgagactctatctcaaaaaaaaaaaaaagcagcagctgtggtgactcttttcttgaggtctttgggggctgcctgttggtggacaggctggtgtgaagttggtagccctggaggagctggggggagttgcagggctagtgtagacaagctacagaagccacaagggaggtgctgcttagagggggctctttattctttgtttggttttaatttgagacgggttcttcctatgttgcccagcctggtcccaaacccctgggctcaagcgatccttctgtcgcggcctcccagagcgctggggatacaggtgtgagccaccatgcctggcctctttactcttattaatttaatgctggttttcctagatctttgtctttttttctggattttgggagatttctttccttgagtatttttcacttattttctattaattttttattttggcagtcatactttttaactaccacagctcttatttaaaaaatccttctcctagtatcacattcttgatttctgggcatataatctttatgggtctctctgaggatatgagttacggttttttgtagtttggattatctccagtttcctgaattatctgtttccttcaggataatctgttcatcttggtctttttctgtgatgctctaggctttcctcagcagtctggtaatcctggttgtccattcatgcttaagaacatgggaatggaaggggtgttgggagtcctatatatgtggatggggttgtccattggctggtttcagtattggactaatgagtagaggaatcaaggaacctctcagggctttgtgttgggacgctgacacactgcattagtaccttctagactatgagcaggggaatcgaggaacctctcagggctttgtgttgggacactgactcactgcattagtaccttctagactatgagcaggggaatcgaggaacctctcagggctttgtgttgggacgctgacacactgcattggtactttctagactgtgagcaggggaatcgaggaacctctcagggctttgtgttgggacgctgacacactgcattagtactttgtagactgtgagcaggggaatcgaggaacctctcagggctttgtgttgggacgctgacacactgcattagtactttgtagactgtgagcaggggaatcgaggaacctctcagggctttgtgttgggacgctgacacactgcattagtactttctagactgtgagcagaggaatcgaggaacctctcagggctttgtgttgggacactgactcactgcattagtactttctagactgtgagcaggggaatcgaggaacctctcagggctttgtgttgggacactgactcactgcattagtactttctagactgtgagcaggggaatcgaggaacctctcagggctttgtgttgggacgctgacacactgcattagtactttctagactgtgagcaggggaatcgaggaacctctcagggctttgtgttgggacgctgacacactgcattagtactttgtagactgtgagcaggggaatcgaggaacctctcagggctttgtgttgggacgctgacacactgcattagtactttctagactgtgagcagaggaatcgaggaacctctcagggctttgtgttgggacactgactcactgcattagtactttctagactgtgagcaggggaatcgaggaacctctcagggctttgtgttgggacactgactcactgcattagtactttctagactgtgagcaggggaattgaggaacctctcagggctttgtgttgggacactgacacactgcattaatactttccaaactttatgttcttcagagaagacccctccttgctgggggtgaggaggtggagaagtgggtcaggcgtgtgccttggctggctgccgcttcatatacagacgtatgatccctggttttcccccgccctctgtgtctcactcccttcctccactgcacttgccatcttcatgtttggggctcttctgggcagatgggcttgatcctcacctgtgaattcctctgctctcctttgccaagcaatgcttgcccatccactttcagatcccccagtttgttgaaatatctagtatgatgacagcttctctgttctcaccattgtcgtggtttataccttttttactccttggctgtaatttaaaggggtcacaggcaggagggggatgagtgcatgtgctcagtccaccatcttgaccgggagccccagaggcatcatttcaattcctgtgatattatggattcctacgggtaggaaaaacacagcccattcaaccaaatatactttaacccctagagatttagctttaacttgtttagaattgtttaaaagtcccttgtattttgcagttttttcattttctccttgaaagtaaaaacatttgtggcaaatagggaagaaaaactttccagttaatcgagaattaggataagtgagatttaaatattatcagatactgataagaactatggcttttaaagaatgtcgtcttagaatcagtttctaattacttgtgtgcagaagagtcctgcagctgtgaggtgatcacagtctttggcctaagccactgccaggtgagtgaaagccaatctggagtcacagagtggcagcgactgcaccggagatgtgtgtgccatttgttaagatgagtcaaatggtagttagggcaacgaagatccacagagggagaaagaaagatactggaaaagcagcagcacagtttaataacagtcatcgttcatgatggcaaggttgtttactataaaaattccatccttcttgcctctgtgctgccccccaccatttttttatttgacattagggcttgctgatttatggcataacgcagtacatttcacctctgaaacaaagtctgtaaaatcttgagatatattaaagtctttattccccaacgctaaagacctcatactgtttagtcctctatacatttagccctttatgcttggggagggggaggttataaatttctagagggaactggattggcaatggtatgtttgatggtgaaatgccttgactaaacaaacaaggctgctccagaaacgcacacacagcaaacctatatgccatataagtaacgtgttatgtggggagttactttaggtttaaaacaaatgtcatactcttgatgcttttaggtagctattatcttggtaaggataagacagaaatatggtgaagttgcatctgattttgagggatactgcgggcaaacctgacagctagcttggttactagaggtttaattagttacagctgctctgccattgtattaatagagccactctgctttcaggcaccatggatgccttttataatttggatgttcttaaaaagagcactgtgtgaaagtgagcagccctgggccgggcgcggtggctcacgcctgtaatcccagcactttgggaggccgaggtggctggatcacgaggtcaggagttcaagaccagcctggccaagatggtgaaaccccttctctactaaaaactacaaaaaaatactccgggcgcagtggcaggcacccgtaatcccagctactctggaggctgaggcaggagaatcgcttgaacccaggcagcagaggttgcagtgagccaagatcacaccactgcactccagcctgggcgacagagtgagactcagtctcaaaaaagaaattgaacagcccattttgtgaaccacttcaaaaaaaagcaaacacattttcctctggcttttggctgttttaggaagaagccatacggtgaaccaggtgatgctgaggttatctggatccaggccatgcagatgaagccatatttacctttgtgatattggggctgatcttggagctgtctggatctgaccagtctccagatgaaaactcttgcaactttcgtttttggatagtgctcacctcgtatctgtactcgtacctgctatttctaggcgaattgtcccctttctcctccctcttccctcatctccctctctcctctgcctggctgacaccaggaaggaggagttttcttttatttagataaaaaaaagttgagaggagggagctccagaaatgtgggatactcagcactggagacatttgggctggaattcttgtttccattcttttcttaccatatgaccaagtaagtccaagaaagtagataggattctgagtgggcagtgaaggtggaaatgtggtcctaaagagaacgggcaaattaagaaaagattgttttaagacagtcaaattgttttgcctgttgaagaaggtgatcagaccctaatgaaactgaaaatgaggagagtgttcccatctcctgcctggttctagcgactctgcaaatgggtgcctgattggtctgttggctctgaagccagcctttgctggatatattcagcctgttttgaagttgtgcagagaacctcacttgcgtcattctgaagacgcagtgagtcaacgcagtcccaagagagcagtaatggccccaaacagaaacttggaatgaaaaatagccatggatttaaagacatagcacattcttcctatgacttcatttggtaatggtaagattaattcacagaaaacccttcttgagtggcgtaccttaaacacatgtagaatgatttttttctttgcttttcccatttagccttttgaaacaggatacacagtagggtgattggtttgggagggcactggtacagtaattctccacctctcacttgcccgtgtgggtgccccatccccaccctcaggcacacacgcactcttagctgcttttggactcctcccgcaatgtcacaatagttttctttgaacattcttgaccctcagtcatgttgacatgcgtttggattttcagtggagaagaattgccagagaagaatcttcctctgattttaaccattgaccatatttatatatgcagtttcagcttgacttttaaattgataatcttttaatagaattccagataacatcttactgtaacaaacaccaaggggattatccaaattcctatttgaaaatatgtcttttatattaccagatttgccagctgcattattatctattagtgtgtactaaaagtatattattttggcttattttgagattagataattcccagtggaattctccccttaaccatctaaatctgtattttttttttccccatttagtttcctaaacagtgaggcttctgggcaggaaatgagagaagaggaggaggtaatatagaataatgcagtggctttcaagcattgtgacccatatgaggaatacatattcagttatgacttagcattcacatatgcacacatacatgtacgtatatacatcacattcacacatatgcatatatgtacatatacagctgaagaaggtctggattagtacttttccttattgtggagcacagtgagtgatattttctttttctttttcttttttttttgagacagtcttactctgttgcccaggctggagtgcagtggtgtgatctcggcttactgcaacctccaccttccaggttcaagcagttctcctgtctcagcctcccaagtagctgggactacaggcatgcgccaccatgcctggccaatttttttgtatttttagtagagacggggttttgctatgttggtcaggctggtctcaaactcctgacctcaagtgatccgcctgccttggcctcccaaagtgctgggattacaggcgtgagccactgtacctggccgatattttctattttatttcattttgaaaaagataggctgtgactcattagtagtggatctcatgactaagaatggatcctgacccaagtttgaagagactggtaggggtaaatttagagcctggggctccaaagtttgtctacccagttttaaatcctggctttccccttaacttgggtgggatcacaccattaaccgtgttacccctctgaagctttggctcccacacctgtgagatgtgaatgttgataacacacacccacctcataggattaatgagaacatgccaagatataatgcgctgaaggtcttagcatgcctgcgcagagccccagcatctgttagctgctgctgctgccgctgtggtggtgactgtccttgctaagatgctgcagctggattggcttcgtgggaagttgtggaattctgttccctgaggatgttgggaaggacagattgtacttaccaagagcatttattgttgtttttattttcttaaacatttccaatgaaaatcatcaaacctataaagttgaaagaacaatgcacctagattcatcaactcttaacacttgctatctctcttacatagaaacatttcccttttaccagtccacttggaaattggctatatactcacgatagccaagaacaagaacactctcttacaccatcacatcattgccacacttaaggaaatccacactgatccaggaacattatttgatatacagtccatattcagaatcctccaggtatcagtaatattttaattatgacccatttggtgaatttaagatggattagatggcctgtggagttattcatggagctgaagacttctgtgaagtaaaaaataaccacccagtgttaagtgtaactctcgtgtggaatattaaatcaattgtgtgttttttttggcatccttgatgtgaactctggagacctgatgagatggaggctgtgattgtttactctgtgttagcttggacacttagcttggcagtaatcacaagagctttagggagtgcatcctttgctagttcataaagatgtattctgataacgggggaccaaaaggatatatcctgaattgcaaagtcgagcagtagattacatttggatttgaatgtaagtggctgtgaattagaaatatttgttggaattagaaagtgtctaggtaggaatgtaaggtctcccctcaaattgagaatgacaaggctgtcttctaaggacagaatttaaggtgaacactgtggaagtttgtgcatgtgttttttgtttgtttgtttgtttgttttttgttttttttgtgacagagtctcgctctgtcgcccaggctggagtgcagtggcgcagtctccactcactgcaacctctgcctcctgggttcaagcgattctcctgcctcagcctcccgagtagctgggatgacaggcgggcatcaccacgcccagctaatttttgtatttttagtagagacggggtttcaccatgttggccaggctggtctcgaactcctgagctcaggtgatctgcccacctcggcctcccaaagtgctgggattgcagggattagccacagcacccagcttgtgcatgtgtgtttttaagaaaacgtccacaaggtaaggaaattcaagcaaccaagaaaagacgcttgataaacagtaagtcccatcttgctagtttcttctgtatttctccagggccactttaattgattctaaaatgtacattatttctcatttttaaaaaaaatctctaaaatcagggtacatcttaaaagcaatataatgccatggtttaattggcacatgatttagtgatacataaaataaaggcacctcttgcagtggcatcttcgatttgaagaagtataatattctacgaatatacaaatttctgtgtttttttgtccccccaacccctgcccttttaaagacatatagtaatatagtggggttataggtttatatactgctacttagctgtgcagagaaattacagcatttaaaaaaatcaccaatctgtcttcctcataagtcatcatctagaaatggggagaagcaaagagtggtattttggccagttaataaggtcttatattcttttggcttaaacagtatcttttgggtaaattctggattttttcatatatcctgccatcccccattaaaaaccagcatctggtcttgggggattgtgagatttttgtggaggtgagggaggccctggcctatgcttgctgcctttgctcatctagtctggtctggtctggtccctgggcctttcgcaggtatcccctgaagtgtggttggtggtcttgaatttttttcttttgtctccatcagggccagggaactgtccttgcttccttttggtacattcaccctgcagcagatgtcatggcttccaagtggaacttcactctctttcttactagttaagctacaggaggcttagagtgctaaaaccgagatgcttcccctgcataaggccatgcaacacggccattttattctgtagccatccgtgttgggatgagtggaaggttgcatctgcgaggtggtcttctcctagagtttcaattaggaagtggggcaaaagccccagtgccttcccttcaacctgacgaccagtctaccctctccccacctgtgctagttatcaatttcttgcttgttatctccaaatccattctgctttgccatgtttcgtgacatgggaactggactctgtcaacagttttcctttgcctgctggcgaggtgttaggctttgtcaacagagtgctggagggacatggcaaggtcatggtgggaggagggcgtcctttcccagtgtgctgattttcactggtgagtgagtatcagtggactggcgtgcaagatgcccagaaacacatatcagccatcatagacagcccagtgggtggtaccgtgcaccagctccaaccacacacaccctgcagggagtttctccaccacgtggtgggctgctgccctgggccagctctggatcacgccctctgacaagcatgtttgccaccggcatgctgtgtgttcctgtggagctgtgccctttctgaagagtctgaatctcagctttggggttgggggaggctctcctaagttcttagttcctccctcttcactctacctgccctttttaagacacatagtaatatagtgggctctaagtagtagacactttgttcatttgctacttctgtacccctgggtcctcttttactcttctgtcatttgttaaaaatctcggccgggcgtggtggctcacacctgtaatcccagcacttcaggaggccaaggcgggcagatcacttgaggtcaggagttcgagagcaacctggccaacatggtgaaaccccgtctctactaaaaatacaaaaattagctgggcatggtggtgcatgcctgtaatcccacctactcaggaggctgaggcacaagaatcgcttgaacccgggagatggtggctgcagtgagctgagatcgtgccactgcactccagtctgggcgacattctggaactctgtctcaaaactaaaaaaaaaaaaaaaaaaaaaaaaaaatctcctgtgggacttcagtctgtggaggttattgagtgatggcacagaaaggccaatcccaataaaagaaaatggaaaatgtttattacttccatttccaagaggggagcatgccacgccacaccacacaggcacatggggaagcaccatccacagggcagaaaggagctgggggaacgcccaggccagagcctttgttgggcttctgtgggaaaggccagacagggccagggaaacatctgaggattggctattttggataattctggggggccctggggcagagggccgtccctcgttgtctggttcctagctctgggtgatttagggtaggagaaatattggctctgtgtgtgagagttagataaggaggtggttcagagaatgggctctgggtggcaggggagacggaaacagctttggctgtgtgtgagtttgaccctgtgattagactaatggatgccaaatagatgaatacagaatctcagaaaacacagaacgctctcttagcagtatctactttttgttaataattcttttattaaattttccctattgaaatgactggtgtggtttctgtctcctgactggtacatcacctcttcctcggaatttgcgggcagggaagtgatgatacatgtttgactgcctcctactctttgcaccctgatgtgagggaagggctggacccttctacatctttctgtctggatgaagctcctctgctgtcatttcctcctccttccctagtgcggcaagcagctctgccagcttgtcatagaagggcatttaagtgactttgccaacacaaacagtactgcaatgaagatatgccacactttgcaattagttattcactttaaagttctgttatgatatagtaacttaataagtgaaaaaaacatcttggaccaataaggatggaagaaaagtatcggaaaactagtcagaattaaaataaggactaaatcacgacttttatttctgtgatttctttttgtatttttgaagctcttttcttaggtcagggccaccatggctttttgttgcattgatctctttatcattatatgctgtttctccttaggctctgcaatattccttgctctgagtctactttgtctgataggcacttcagctttcttttgatcacgcttgcataatacaccttttcccatccttttactcgtagcctgcccgtgtcattgccccagtggggaactgctgttgctctttacttggagccaggctcatggtaagaggatggggactttcttggttctcttagtctgactccatcttaggcaggtactgtgtgcctggacttcaggatagggctttcttagcattgtgtgctttcaccctccatgccacctggactctgccttctgtgtgtgtgtttgtgtgtgtgtgtggtgtgagctcccgtgtgagagagaatttcccacgtttccccccaaccccacccgaagctgacttttgcattgtatcagtgcagaatccagcagacgatcatatttgctggtacctcacccccaggagcagcagatctttgcctgggtcccggggacagggaaggtttcttgcccttcccccagtggattacggcttttgcattaggtctgagagaggggctcaggaaggaggcaagattttacccgagtccggtattgaggggtgctctctccagcctcgtgctctgctcccagtcgtcgtcacgagcacctggtagtggcccatggaaaagggtttgcaagtgagttcagacaggaattctagtgttacaccagcccatgctcagctccataagaattcattaaaaattgagatgttttcccgtcacctgttgacatggcagcctcatcttcctcctgtgctctgtgaagggtcacagggtttgcgtgtcccatttctccttggagggatttgtcactgattagaattcagttcacctgatggccttgtggcctcagctctctgattagctcaagaaaagttaggattttgttgattatctggctttttctttttgttgggttgaaagttctcttatggctttctgcatcttaagcaaggggagtagaactctatttcttcacctgtccctcagcagaattatgtaagtaaaataaaatttaggttcctcacagatcagtgcagtttgctaatacaaatactgtatgtatagttactctgttttccacatccaccattggtttaagtttgaacacccctgttttactttgtattttgaaataatttcaaacttacagaaaatttacaagaatagtacagagaattcctacatgtcctttacttagttcgagtcatcaatttttaacgtattgctacattacatttgctttaccatttccccccttctatatgtgtatgggtataaaatttgtttttcggaatcatttgggagtaggtcacaacattttgtccttttatcccttaatatttcaagtgtatgttgtaagaacaaggatcttctcttatgtaactatagtataattattaactttaggaaatttaactttgatagaatatttttatttaacctaaaatccgtattccaatttcctcaattctcccagtaatgtcctttctagcaattacccccttgggtgtaggatccagtcctggatcatggattgcattaatttgtcatgatctttaatatcctgtaagctggaacagttcctcagtctctctgccttgcatgacattggtatttttcaaggacatggagcagttattgtatagaatgtttttcaattttggctggaacatttcagtttcagtttgtttgatgtttccttactattagattcaagttacacatttctgttttagaatattacagaagtaatgctgtatctttctcatggtgttacatccatttgcataccttgtctttctgcctgtcgttaatgatattaattttgattatttagtcaaggtactgtctggttccttcattggatagttgctagttttcctcttgcatctatttgcttttcggtttttgttttttcccttaactttttctccctgtgatttcctgaaacctcttgcatctaaaaagcaatctgtggggagacattttgtgaccatataagtaacctgctcctcatgaaacataaaatacaaaccttgggttctcttagagtggagaaagggatcagtgatccaagaccgtttctcataaagctaatacctcagagaggctacaccatcagagagaaaatgtacgggggagaagcacattacacagtatcaatcagaaaggaatatttctgtctgagctttcactttgagtggagggcaaagaaaaaaaatcacatgagaacttgtggctgctgaccagctgctcccacatgggtgtagaaactggttttatcctatctgtgtgacctccaatagctgcaagttggaaatcttgatttagagtggacctaggtttttaccatccctgggtgcttgacaaaagcaagtttaagtcttccctaactcagagtttccatagatcattgcagccaatatgaacacaccaaaaaaggacatacacacacacacacacacacaccctgaaacaagatatcatgcgcaagagtcagtagaaacaatagttgttcctgacaatttcagatattggaaatattgaatatagactataagttaatttactacctttggggaagcaaaagaaggaattgaaaatatgaggaaagagagagatacatcaaaaacaaccaggcagttttatttttaaaaatcaaatataatgttcagaagtaaaaagcataatcattgagataaaaaatttatggattggttaaatgttagaatagaaacagcagaaaccagaattagtgaactagaagataagtctgaagaaataacacagactgaagctaatagaaacaaagggatgtaaaccacgagaggctcagagatatagtgagaaggtccaacttatgtctaattggagttccagaagaagatactacagggaatggcaaagagagaatattgaaacagataatgagtgagaatcttcacaattgatgaacaacaggcctttgtctgtcatttgtggaagctagcacaacagtttaaacggaggcccataggccatgtctaaatatttaaaagttacaaatgtgacagactgtgaaataaaatatgtctatactcctaccttgacaaatatgtctctctgatactctagaagatgaggtttaaatgtagagttcttgaactccacagagctctatgctggcacatagcagcacagagtgagccagaccttcgcctgtggcccccacccttttgtctttcttcccgcagctttatccatgctgtgaggggcctcatgcacacatgtgtacatacttcagcctgcatatctaagctgtgttcacgctcctcacaagcatgcttgtaggtggcaactctggcctatgcccgtatgctggtgcattctactttctttcatttttattttatttatttatttatttatttatttatttatttagagacagggtttcattctgttggccaggctggagtgcagtggtctgatcatagctcattacagccttgaacttctggactcatgcagtcctcctgagtagttgggactacattaattaccacacctagtattttttttttatttttattttttgtagcaacagggtctcgctgtgctgcccaggctgggtttgaactcatggcctcaaacactctttctgcctcagcgtcccaaagtgctgggattacaagcatgagccactgtgtcgggccagcattccactttgataatagacctgtggaaaaggcccatgcaagtcctgaatgtgggcatggattcaattaagtagggaattccaggatcctggatacctagaatatggtgatcagactcagggtgggtgcatctccttgggccttcaggccccttgccctgtggggagaggtggagtcttttaaattatagaatctagggtaggggcctctcttggaacaggttctaagggtggtaatgagagacaaaaattctctggttcaggaagcccatcaaattccaaagcggcaaagaaggaaaggaaagaaattcatgtctaaacatatcagtaaacctgtgaacctatagaacatcaaaaccagaaacgattcttaaaaataggaagagagaaaagacagattacctacaaaggaacaacaattcatatgccagctggcttttctataccaagagtggaactactgaaacagtgttttcaaagtaggcagtgaaaataactgttgatctagaattgtgtagccatgaaacagcctttaaataatgagaacgaagtgaaataaagacattagataaataaaaacaaaaagaatttactgctgagaattcatcactgtgatggttaatattaggtgtcaacttgattgggttgaaggattgtttctgggtgtgtgtgtgagggtgttgccagaggaaactgacatttgagctgggggactaggagaggaagacccaccctcaacgtgggtgggcaccatccagttggttgccagtgcagctagaacaaagcaggcagaagaaggtgggataagcttgctgagtctcctggcttccttccttctcccatcctggatgcttcctcccactcctcctgcccgtccacataagactccaggttctaaggcctttggactcttggacttgtaccagtggcttgccaggggctcttgggcttttgccacagactaatggctgcactgttggcttccctggttttgaggctttcagactcggactgagccactacgagctctctttcccggcttgcagacctcatatcgtgggactttgccttgtaatcatgtgagccagttctcccaaataaactccctttcatatatacatatatcctattagttctgtccctttggagaatgctgactaataccatcactaaagaacatcctcaagaagaagggaaatgacaccaagaaggaaggtttaaaatttaagacaacattaagttgatccagagagatgcattaacttgcctaaagatcacacttggttcagaaccaagcctagacttaaaccgagacaggatgcaagaaagaaatcaagttaacgacagaatttcattttcacccaggaagtagacacagggtcccttggggctcattttgggagaaggcctacctttttcccaggacacaccaccatttacacgtcgagtcttacagcctccaggactttaagcttcccactgctaatgtgtcatttttcctttctcttgccactgagttgtttgctcaactagaggattttactttctgcccttcaagttcacatggtagctcgcatggtaacataagtgagtcttggcagtgttgccagggacaggatgactttaatttcattcctcctcatcttgatgctttttttccctttccagttcccatcagctacttccctacccctagtggtcctatgagtccttcagttctccccctttctccatgacacaccaggagccatgtcagatgtgatttctgacctgggaccctgaatggcacaaggagaagaagtacggaattgggggagggtataagagggtttaagatgcgtgaaaaatgttgagtaggacatttcaagagatagttcaaataatatggtaccttttgtttacgtcaccacacttggcaaatttgatcgtatgacatctcatttgatgtctttgagatgacagatgttgtccctactgtagagctaagatcctcagagaggttaaatgacttgcctgtaatcactaagttagaaagtggcagagccccagaactaccccatgcagctgctttctagtttctaatcaggtgctttttcactaacaccatcttgcctctacaaactgacggcttacaaaatgctaccaaagggtaatactttttatttttgagatggattttcactattgtcacccaggctggagtgcaatggcacgatctcggctcactgcagcctccgtctctgaggttccagcaattctattgcctcagcctcccgagtagctgggattacaggtgcccgccaccatgcccacctagtttttgtatttttagtagagacggggtttcatcatgttggccagactggtcacgaactcctgacctcaggtgatctgcccgcctcagtctcccaaagtgctgggattataggcatgagccaccgcgcctggccaagggtaatactttttaatcagccaataagattcacatggaatttgcttatttttagtattcctgtcagtattgatggatttctttaaaagttttttccatagatctatttgcccatcacctctccaactcctccagcatctgccccctttcttccgcatacatattgtgatgtctaactgggccttaattatcatgaattttaaattggtggtatccatactaatcaggatttcctgtaattggaacattcttcacacttttgatatttgctgattgtcctctctatgcattttagaagtttcagactattttttctgagaaataactagagtctgtgcaagctgtgtcgtacattttgactgcaattttagtactgagtgttgcttgcttgaaaagaggcaggtaaaccaagttattgagtgcagtttcaaacacaagccaccactgttccatagatcaggggtccccaatccccaggccacagactggtcatggtctgtggcctgttaggaaccaggccgtatagcaggtggtgagcggcaggtaagcaatgaagcttcatctgtatttacagccgctccccatagtactcattactgcctgagctccgcctcctgtcagatcagtggcggcattagtttctcataggagcatgaaatctattgtgaacagtacatgcgatggatccaggttgcgtgctcctagtgagaatctaatgcctgaggatctctcattgtctcttatcactcccagataggactgtctagttgcaggaaaacaagctcagggctcccactgattctacattacagtgggttgtataattattatatattacaatgtaataataatataaataaagtgcacaataaatgtaatgcacttgaatcatcccagaaccacccctcagtggccccatccccagtctgtggaaaaattgtcttccacaaaagcagttcctggtgccaaaagggttggggactgttgccattggatcatgacacattactatcttgttgaattaaacgttgcaaactgcaacgtttgtaactgccagtaggcagtttttattttatttttcattttttatttatttttttacctgtgagcccacatccataaagttagcagactatgtcatagtcaagagactttgctttatgaactagctgatttagtttgctcacaagctttgaaagagtctttttttaaaggccaagtttaagacaccttagaccatagaaatatgtgtatttcctggccattcgatcatttgaaggccagattttatcaaaacaaatgaatcactgtttctccttccttcatcattccctaattggtttccaaaataaaatgattagtggctgcatttctcaactgcattgttttgattacagtcttactggctgtattgggtgagacattgggaaatgctttcataactggtgatcactgttgacggggttccctgacttcataaaggcccagattatgttaccccgagaaagtctttgaaggagcaagctctttcttatgcttttgttattaagttagggaaaatgactttaaataatggaaccttagttacaatgtaggttccactcttcttgagatttgtgttactttttagacatgacaaaagtgtgcattttagagttcctcttaccccaggaacaatggactcacttggctttcaaaagggcagaatatactgagtatttctgactgcaggtttcttctttctggtaccctcaaaaatacaccataaatagtagattaatctcccttttgctgtccgtgagtcccttcccgtttcttcagcactgcttgatatgactggtatggaggcctaaagctggctggcctagttagtgttacccaagtggtttcttgtgagcatccatttgcatgcagttgggccttttgtccattggtgaactgctccttgccttgaggtcctgtagctagtttgccactgagtatttccttcaaaaaacaggaaggatgccctgatattatgaagtgggtggttttagaattccacttcagatggcactgacctttccttaatacagctggtttcacttaatacattttgtttaaacaaagcctgttcctggaagtggttccagaatagtctgttccttgtagctgttcctttgctcttaattttaaaagtgttttcccgacagtatcatatgtgctcgcacgacagattagaaacttctgcttgaagtcatcacacttatgaattacgttgtgtccagttatgatatattgatgattgtattcagtagcttgaaggtttaagtgataactttattttgcaaaactgaccacattcttttgttgcttaggtgtctcccctttaagggattctgatgtctagcagtctcaatggacaaaacagataaaagagagaatgagtatttttcactttgtaaacatgaacaattcttaacaaaaaagccagagctggactaattaaataatcaacatgttttaaagtgggatagacatttctattttaggtatgataccacaatatttaaattttaggaaagactggatagaaatataaaataagatactagtagtcctgctctgacttttctaaaacaagtttatattactttatttaaaaatgtttatgagagtgccttttaaaaatagggatttataggctgggcgcggtggctcatgcctctaatcccagcattttgggaggccgaggctggcggatcacctgaggtcggagttcgaggctaaaaccctgtctctaccaaaaatacaaagttagctgggtgtggtggcatatgcctgtaatcccagctactcgggaggctgaggcaggagaattgcttgaacctgggaggtagaggttgcagtgagccaagatagtgccactgcactccagcctgggtcacggagtgagactccgtctcaaaaaaataataataagataaaaaatagggatttataaaacatatatgcaactcattaagaactttttggctggccaccatagctcatgcctataatcccagcattttgggaggccgaggcaagtggattgcttgagcccaggagttcaagaccagcttgggcaacatagcgaaacctcatctctacaaaaagctgggcatggtggtgcgttcctgttatcccagctacttggaaggctgaggcacaaaaatcacttaaatctgagaggtggaggttgcagtgggccgagatcaatcacaccactgcacgctagcctgatgaaggaaggagaaacagtgattcatttgttttgataaaatctggccttcaaatgatcgaatggccaggaaatacacatatttctatggtctaaggtgtcttaaacttggcctttaaaaaaagactctttcaaagcttgtgagcaaactaaatcagctagttcataaagcaaagtctcttgactatgacatagtctgctaactttatggatgtgggctcacaggtaaaaaaataaataaataaacaaaaaacaatgtctttctctgccttttgttaaaaaaaaaacaaaaaaactttttttgcctgtaatcccagctactcaggaggctgcggcaggagaaccacttgaacccgggaggtagaggttgcggtgagctgagatcacgccattgcactccagcctgggcaacaagagcgaaacttcatctcaaaaaaaaaaaaaaaaaaaaaggcactttttttttggccaggcacagtggctcacgcctgtaatcccagcattttgggaggctgaggcgggtggatcacgagatcaggagttcaagaccagggtggccaagatggtgaaaccttgtctctactaaaactacaaaaattagccaggcacggtggcaagcgcctgtaatcccagctacttggaagggcgagacaggagaatcgcttgaacccaggcggcaaaggttgcggtgagccgagatcgcgccactgcattcgagcctgggcgacagagtgagactccatctcgaaaaaaaaaaaaaaaaaaaaaaaaaaaaagaactttgaataaacttcgttgtgtcatattctatcgtaagatttattcttgtctttggagaacttagcttataattaattatattttaatgaataggatactttttgtttgttttgtttttgttttgagacaagtactcgctctattgcccaggctagagtgcagtagcatggtcttagctcactgcaacttctgcctcccaggttcaagcgattctcgtgcctcagcctccccagtagctggtactacaggcgtgtgccgccatgcttagctaattttcatatttttagtagaggcagggttttgccatgttgaccaggcttgtctcgaactcctagcctcaagtgatccgccctcctcagcctcccaaagtgctgagattacaagtcaccacgcctggcttccgtatttaagtattaggtggtgactccatacaaaatatttaacagcttgctggttaacatttaaatctttgttgctaagaccttttctatgtttgacagttattccaaacacgttccatataggaatagtttgccaaatagaagaacacgggatattcttctcccatggctgatgtgttgtgattctaggtgcatatttctgtttccaagaacacggacctgttctcaagttcaaacactgcatcaagagactgtgccccatgtcttttcacttttttccctctctctttctctccccttcccctccttgatttaatttcttcagcaggtcagaattgatacagcttccagaagaaatagtagaagtaggcaaaagattagtttttaattcttgttctgtcaaatactttttgattgaaattgtttttattacaaaggtagcatttgctttttgaaaaacaaaataagaaaaatctttttaatcacttcactattaagtttgttgaatattccctcataactttttctcctggctttttgagtatttgagacatttctttccacattgcagttttgaaacattctaccccacactcatacatgaaagtgaaggctctgcttctcagagtacagtttaatttactttgtggacatcattaacaaaaggcagagaaagacattggaccatactaattgtgggacttagaaaagctatattagtgatggttattaagtatcgcttgcagtggagtctgtaacatattcctatgaagttaatctaactactgagatagtgggagtgcagaggaggcatgctgtgagatggagtggtattttccagcatggcttttctgtttcttgaaaaccctacagcactttgccatggtttctcatctggatgaaataaagcacctgtaccttagtatgtcctgccatgcctttgtatggcatacttggctttgttctccaggcctcttcccacagtaacaacggattctttaggaattggaagggggggccgggcatggtgactcacgcctgtaatcctgggactttgggaggctgaggcgggtggatcacgaggtcaggagtttgagaccaacctggccaatatggtgaaaccctgtctctactaaaaatacaaaaaagaattagctgggtgtggtggggcatgcctgtagtcccagctactcgggaggctgaggcagaagaattgcttgaacccaggaggcggaggttgcagtgagctaagatcgtgccactgcactccagcctgggtggcagagactccgtctcaaaaaaaaaaaaaaaaaagaattggaagggaatggaggaagcaaggtggttaaacaaaaatcatctttacacacaccacccactctatgatgtatatgagttcagaagagcactttgctttatccttaatagaaatatctgtaaagccaggggagtcataaagctgtaggctaagtaaggtgccatgagaaaaggaggcttcacttacgccagtatttggagcagcgtttggcctcttggaggtgtttgcacccatcggagatgctccatagtgagatttaggataagtgcaaggtgagctttgcttttgtaaaatgcatgaagtgtgaccacgaaagggccatgggaaagaattattgatgggttacaggtgcatcgtttcaggcagattgacactaggaaagagcaaagagcaggtagaggtttgacagtttactcctttaaagtaatccatgtccaataacccatggaaagtcttcatgtacttctaaggggtagacataccctagtctaggtgctaatctaggttctatcatgtgttagctgtgaccctgggcaaataactttatcctatggcctcaatttcatcttgcaaaaaaatacggattagataatggcacttccttaaaaggtttgatgggatttcaatggaatattgcatagaaagtgcttgaggcattgtaagtacacagtaagtgaagtgttgaccattattaatatcatgatgataaagtgtgtaacttattttataagtaccatataattgaaatttgccaatagtaactcctcggagacttccagggaactctgtcaatcaaaaaaagctttgtgtaataatggacgctaccttgacagagtgtgttagtcaagagaggatacttatttataaattttgggatatttatacttttttttttttctttagagatggagtcttgctctgtcgccaaggctagagtgcagtggcgcaatctcggctcactgcaacctctgcctccccagttcaagtgattctcctgcctcagccttccaagtagctaggactacaggcacctgtcaccaggcctggctaatttttgtattttttaggagagacggggtttcaccatcttggtcaggctggtctcgaactcctgacctcgtgatccacacgcctcagccttccaaagtgctgggattacagacgtgagccaccgcacccaactataaaatgtatttttatagatacttattgaattttaggatgtgggctgggtgattattttttaaagtacttttaaaaaaattaaggtattatttacatataatatccacccatttttaagtatacattttggtgaattactgtgtgtcaatcatgtaacctcaaacacagccaagattataaaacagttctctacgctgctttggtgatggatacaccaaaatctcagaaaccaccactacagaacttattcatgtaaccaaacaccatgtgttccccaaaaacctattgaaaaaaaaaaagaacccaaaaccaaaaaacagttctctcaacattaaaagttttcctgtgcctttttccagtggattccttccctcagcctctggccccagacaaacacttatccactttctgtgtctgtagttttgtcttttcaagaaattcctatgaatggaaccatataaaagttatataaaaatcatagacttttgtatttgatttcttttactcttagcatcatttttttgagatttactcctgttgtatgtatttacatttcctctttttcttggtgagtaatattgcattatatgaatatctcacaatttatccattttactagtggataacattagattgcttccaacttgaggctattatagtacagctgctatgaacatttgtgtattcaccattgtgtgagcatatgattttccctaccttcttttctatttcactttcttttcctttttctttcctttttttttttttcttttttttgagacagtctctctgtgtcgcccaggctggagtgcagaggcacgatctcggctcactgcaacctctgcctgctgggttcaagcaattctcagcgtcagcctcccaagtagctgggattacaggggcccgccaccacacccagctaatttttgtatttttagtagagacggggtttcaccctgttgaccaggctggtcttgaatgcctggcctcagtgacccacctacctcagcctcccaaagtgctgggattataggcctgagccacagtgcccggccctttttcctttctttttttgagataggatcttgctcaatcatgcaggctggagtgcagtggcacacttggctcactgcaacctccacctcctgggttcaagcgagtctcctgcctcagcctcccgagcagctgggactacaggtgcgtgccaccacgcccagttaatttctgtgtttttagtagagacggggtttcaccatgttggccaggatggtctcgatctcttgacctcgtgatctgcctgcttcagcctcccaaagtgctgggatgacaggcgtgagccaccaagcccagctgacaatggattttctttgttttctccttcatctgaagatgtcttccctttgccttcatttttaaaggatattttctctgggtatagaattataatccgagagtatagaggttgacaagttttttggtattggttttagttttgggttgtgtctttttgttgttggcttttgttttgtttttgccccttatagatgtttcactgtcttttggctcatgtgttccgatgagaagtcagcccttcattgggtccttgttctcatctgtttaatacctgttcccatacctgccctttctctctcactgcttttaagatttgctctttatctttggttttggagtatttgactatgaagtgcaagctgctttgtttcttcttggtgtacattcagcatcttgcatcttcaagtatctgcgtatcattaagtttgggcagtttttggctcttgtttcttctaaattttttctaccccattctccctgtccctctccttttggtattgtagttacccactggaacacgtgacattatgtagcaagtctctgagtctgttcatttttttccttcagtctttttttttttttttgaaatggtctctctctgttgcccaggctggatggtacagcggtgtgatcacgactcactgcaactttggcctcctgggtttaagccatcctcctgcctcagcctctttgagtagctgggaccacaggcacgtgccaccacgcctggctaattttttgatttttactagaaacagagtcttgccatgttgcccaggctggtcttgaactcctgggctcaagcaatccacctgccctggtctcccaaaatgctaggattacaggtgtcagccactatgccagccttttcaattttttatctctcttcttcatcttggttaatttctactcatcttttttgaaatgcacatactgtccttttctttgtccattcagctgagtatatccagtgaattttttatttcaaaaagttaatttttttcagttctagaattgccatttaattattttttgttgttcctatttcccccattgagatttcctacttcttagctgagattttcattcattggaaacatgccttatactgcttcattgagatgattataatagctgcttaaaatctttgtctattccagcattttgttgatctgcaggttagactggcagttgaactaatttgtcccactgtcttgcttctttgtatggtgggtagttctggattgtttactggactgtatgaatgtcaaattctggatattctggattctgttacttttctctaatacttgtttggttttatcaggtggttttcttggctgggtttgaacacaaatgtgtttctctctgagatctttagtctgtagctgagctgctttgtgtctgtcccatgcatgagtggctcaagggtcagtcagggatgtgattgtacggggattggagatcttcccctgcctttttcccttctaggattacttcagtctatttatttatttgtttatttatttagagacagaagtcttcctctgtcacccaggctggagtgcaatggcgcgatctcagctcactgcaacccctacctcccgggttcaagcgattctcctgcctcagcctcctgagtagctgggattacaggcccgcaccaccacgcccggctaatttttgtattcttagtagagaaggggttttgccatgttggccaggctggtcacgaactcgtgaactcatgctctacccgcctcagcctccccaagtgctgggattacaagcgagagccactgcgcccagccggctctctttgttattcatagtttcctggcttctcttttctgagccacccagccaaaaatgctttgactttttctatgcatgtttctgtcatgtctgtgcatgacataaatcataatatcctaagacacaaaattgttaaaggcaataatttggaaacatacaacaataaataaaatggttatagagatgtaactttaaaaagttgaacattttgttaaaacgattcctgaatatgctggaaaattcagatagttaacaaaatattttgaggataaaaaggaaaggaatctgttatctggaggtagaataacttggccattttacagaaaggaaacaaattctgatttcactttttgtatatcatccatttgacaattttcaataaaaggtttattgaaaacggaatacataaggctggtgtttggacctttttcctaattagaaattgtccatgtctccaaagattattaactcagtttattatcagctaaagagatcttaaagttgactaaacacctggaaattaaaacttaggccaacacatcaaagtctttatgacttgaagtgttttaagaattaatgaggcaaagcacacacctgtggtcccagctacccaggagactgaggcaggagaactgtttgagcccaggagtttgaagctgcagtgagctatgatcatgccactgttcttcagcccaagagactgagtgagacctcttaagaaaaaaaaaaaaatgaccggacacagttgctcacgcctgtaatctcagcactttgggaggctgaggcgggtggatcacgagatcaggagatcgagacaatcctggctaacacggtgaaaccctgtctctactaaaaaaatacaaaaaaattagcagggcgtggtggtgggcgcctgtagtaccagctacctgggagcctgaggcagaaaaacggcgtgaacccaggaggcggatctcggcagtgagctcacaccagtggctcacacttgtaatcccagcactttgggaggccgaggtgggcagatcacctgaggtcaggagttcgagacaagcctgaccaacatggagaaaccccgtctctactaaaaatacaaaattagtgggcgtgtggcgcatgcctgtaatcccagctacttaggaggctgaggcaggagaatcgcttgaacccgggaggtggaggttgcagtgagccaggatcgcgccattgcactccagcctgggcaacaagagccaaactccgtctcgaaaagaaaaaattcatgagactaaatcattttaaaaagatgtcttttattacaatttctttcaattaaacagttttatatttttgaaattttaaacaatttgtgcaaacgagatcctactggacctataaaactaatgtagttaatttagaaggtttaaatcacgagaagttaagcccaaatcttgggttgatttaattgttgtgttaacattgtttttatatcataataaaatcagaaggatgcatagacttgtttttaagctaatattaacttctatttctagcccaaagagtcatctatcaaaagccagctcatattaagtagggggaccaagagggaggtctctcagttaaacaaagttattgacttgtctttagacaggcaagacagagtatctcctcataaggttttcttttaacctttttgttctgaagttaatatgtcttttaagtgaataatcttgtttataacaacattttcttttctgttttgtttgtttgtttgtttgagacagagtctcgcactgtcacccaggctggagtgcagtggcacagtcttggctcactgcaacctctgcctcctgggttcaagtgattctcctgcctcagcctcccgagtagctgggactacaggcacatgccaccactcccatctaatttgttttgtgtttttagtagagacggggtttcacaatattggtcaggctggtctcgaactcctgacctcgtgattcacccacctcggcctcccaaagtgctgggataacaggcatgagccactgcacccagctataacaacattttcaaagtggcacattttaatatgaataaaccttctacaatcacaggcctagaaagtttttctttttcttacggaatttcttgactgtttacttgtactagatatttcttcggtatattcataatgacagaacaattgtttatgattgattgatctccaaagtttcccaagaaaagagaaaaagtaggaggggaaggaagaaagaagtgagcagaagttggcttcagagagataggaagggccagttcccttctctgtttaaggaggggagaagacttagatgcagggaaactcattttgacatgccaactcaaaccacagaagccagagtcagttcagctggtttcagtagtaactcaggaccttgacaattctgttaagccatgtcctttaaaagccagctcttattaagtagggggatgaagggggaagcccttcagttaaacaaagttactgacctgtcttttagacaggcaggacagaggatctcctcatgaggtttttttaacctttttgttctgaagttaatgtgtgttttaaatgaataatcttatttataacaacattttcagcgtggcaactgcagtttcagaatggtggaattataccagtcagagagagatgcaaatgatttaaaataggaagaaagcaggtgtctggcccagaggaccagattaagaagaccccatgagagttacaatagttagtgaaaatggtgcttctgcaaacctcatgtctacagaagctggtcaaagaccagatgccaccaggtagaatcccagcaaactcttcaatggtagatatctgtcaccatccttaggaggtaggtctgtggaagctcactataataccatttgcttaacagatatacaaacatggatcagatataatttcaacccacaaggagctcacagtctggctcttcttttgaggcaaaaagactaaagctgttgcctttatggtaagataaatctgccttggagtcaatccaaggtgatttaattactgtaggtagttgtaccaataaggcttgtatcccagagaactccatattgcatttaagcttgttagtaagccaggccagctctatttcctgtgaggactttaaaaaaaattgcattcacacatttaaaaattagcataagcagggtgcagtgatgcacgcctgtagtcccagctacttggtaggcagaggtgggaggatcacttgagccccagaagttcaagaccagcctggacaacaaagtgaagtgaagactgtctcaaaaaaattaattatgacataaaatgttatatgtcttaatttacacaaatataagtatatacttttaaatcccattcttacacacaaaagctagcatactgtgtaaagtattctggacctacacacctttatttttttaacataacaatatgtcttggatacattttcctatttgtctatagaaagtttcatcattattttaaaaaatttgtttttggctgggcacagtggctcatgcctgtaattccagcactttgggaggccgcggcaggcgaatcaggaggtcaggagtccgagactagcctggccaacatggtgaaaccccatctctactaaaaatacaaaaacttagctgggcgtagtggcgggcgcctgtaatcccagctacccgagaggctgaggcaggagaatcgcttgaacccgggaggcagaggttgcagtgagccgagatcctgccacagcactccagctggggcgacagagtgagactccatcttaaaaaaaaaagtttgcttttatatttcatacctgcatggtattctattgtgtgagtaggccatcatccagtggtcttcaaactttcctgtgtactccgtaacagaatttgttgttttgacatgcagtctcactctgttgaccaggctagagtgcagtgccacaatctcagctcactgcagcctccacctcctgggttcaagagattctcatgcctcagcctcttgagtagctggcgcatgccaccatgcttgactaatttttgtatttttagtagagacgggatttcaccgtgttggccaggctggtcttgaactcctgacttcaagtgatctgcccgccgtggcctcccaaagtgctgggattacaggcttaagctaccacgcctggtcttctaatagaatttttaaaaactgtatttacccccttgcacatttaaattgacatctaagatttttattataagtttaaatagttgtaaaggatgtattttccattatattttatacattccttaattttatatatatatatatatatatatatagttttttttttttttttttttgagatggagtctcactctgtcacccaggctggagtgcaatggtgcgatctcggctcaccgcagtcactgcctctagggttcaagagattctcctgcctcagcctcccgagtagctgggatcacaggcacccgccaccatgcccggctaatttttgtatttttagttgagatggggtttcaccatgttggtcaggctggtctcgaactcctgacctcaggtgatcccccccacctcagcttttcaaagtgttgggattacaggcgtgagccactgtgcctgccctcccttaattataatttaaaaaatttttgcagatgtagatttatataaattggcaagccagttctctttatcaaattaactgatcaaaaaaaaaaaaacagattaactggtcaaacatagatttactttctgtcagtaaaattttgacttcatttttttaaatcaaataagcatgttaacccggtattgctgtgacaacctttatcctaatttcttttcttcttcttcttcttcttcttcttcttcttcttttttttttttttgaaatggagtcgtgctctgtcacccaggctggagtgcagtggcacaatctcggctcactgcaacctccacctcccaggttcaagcaattcttctgcctcagcctcccgagtaactgggactacaggcatgcaccaccacgcctggctaatttttgtatttttagtagagatggggtttcaccgtgttggccaggctggtctcgaactcctgacctcaggtgattcgcccaccttggcctcccaaagtgctgggattacaggcatgagccatcgcacccagcttttttatcccaatttcaagatgggtgggcaggtaggtaggtaggcaggtgggtagatagatagggccttcagacttgcctcgcattcatcttttacataaaataagacagtttcaccttgaacacttctgtggtgagactgtttagtcttgtagctctaaactccagccatactctgatgactcccacatttataaatcccagatttgtatactcaactacttatctaacaggtcaaaactgaactcttaaaattcttacatttgtgtccacacatgattggctaagctaatggggctcagatttaccctgtcacctgaaacaactgtaaaactggagaaaatatgtcaaactctgaagttattaggtctaaggtgattaagaacagcgaatcctgagacctgagaaatagagccctatgattgctctgatttaatgctcggagaaagtttccagaccgcggtgcggggagaaggaacatcagcaggccccagcagtctctcctcattgaagaggtaaaatgaaaatccagggcagctggggcagctagagttcacaggcagagaaacaaagaggcaagagatgcacagagaagagaacactggcctgcagatgcccagggagcccactcgagtattcggttgagtactgatcagtgcacccatgtgaggaaaccccttagttcagggaaggagccactcaaaaggattagagagaaccatttacggagttcacacagggccagaaatagttcctgttcccagtagcagagtagaacatttcatgattcaggggtattgattggagtactaagaagagttgtattagtgaaggttcttgagagagagagagagagagagagagagagagagagagtgtgtgtgtgtgtgtgtgtgtgtgtgcacgtgtgaagaaatttattgtaaggaattgccacgtgattatggaggctgataagtcccaaaaatctgcagggcgagtcagcaagatggagacttaggagagccaatgatgtggctatagtccaaaggctgacaggctcaagacccaggcagagccaatgtttcagttcaagtccaaaggcaggaaaaaagttgatgtcccagttcgaaggcagttaggctggaagaattctcttttactcaggaaagggtcagattttttgttcaattcaggcctttaacagattgaatggggctcacccacattagggaggccaagctgctttacgcattttgccagactaacgtttgaccaaagatctgagcacgtatggcccagtcaagttgacacataatgttaatcatcacaaaagtcttgcctcaatagttgggaaaaattaatcctagaataaatgctattctggtcttgcttagcaaaggttaagagcaagaccaaaaagatcaaaccttttccaaacaaaagctgaagaatatttttagggatacaaaaccatctaggaccgagtgtggtaaaatgcacaatgtttaccagccattccagaattactaggtatgagcagaagtagtaacatacaaccaataactgaccagaaatgagacagattatataagtagtacattacagacattagtcattataattgtattccatgtgttcagtaagctaaagaaaagatttaatatgttaagtaaagacatgaaagatgatggctgggcatggtggctcacgcctgtaatgccagcactttgggaggccaaggtaggtggatcacctgaggtcaggagttcaagaccagcctagccaacatggtgaaaccccacctctactaaaaatacaaaaattagctgggtgtggtagcgtgcacctataatcccaactatacgggaggctgaggcaggagaatcacttgaacctgggaggcagaggttgcagtaagccaagatcgtaccactgcactccaacctgggcgagagagcaagattccgtctccacaaaaaagaaagatacagagatgaaaaatacactgaagactgtcagaataaacattgcacaagtaaagatttgtgattttgaagacttaaccatagaaactatccaaaatgaagcagaaaaaaaaaagaaaccctgaaaaaaatacatgaacacaacatcagtaaagtgagggacaacatcaggtagccaaatgtgtgtggaattggagtccctgaaggaagggagggtatgagggaccaaaaaatatatatagagagagaaaaaaaaatggctgaaaaatttccaagtgtaatgaaagcagtaaacacacagatccaagaatttcaaggaactccaagcacaggaaacatgaagaaaaactatatactaaggcacatcttaagcaaattgcttaaaaccatggtttaaaatggccaaagaaaaagatacattatatacttaagatcagggtgacaccagatttctcattggaaacaatgtaagccaggttaacagtggaacaatacatttaaagcaaagaaagaaaacagttgtctacctagaattcttttctcagtgaaaatacctttcaaaaatgaaggcaaaataaggtctctttcagactttaaaaaaaaaaaggaagaatttattaccagtagatatgcagtacaagaaatatcaaaggatgtaattaaagcagaaagagaatgataactggtagaaaactggagccaccaggagtcccaggctgcagtgagctatgatcgcaccactgcattccagcctgggtgacagagtgagaccctctgtctaaataaacaaacaaataaaagaaaactggagctataaaaataaatgaagacaatgcaaagggtaactaagtggataaatacataagatattttttctttttgtttcagtctcattaaaagatatgtcttagaggtaattacacattgtagcatttgtaacttacatagaagtaaagtttatgacaatagcagcacaaagactgggagtgggagaacaaatatactcttgtaagctttttacactacatgtgaagttgtataatgtcaattgaaggtagactgtgataagttaaagatgcatatgataaaatctatagtagcagagttatagctaatgagccaacaacaataaaaagttgggatataatcccaacactttgggaggccgaggtgggtggatcatgaggtcaggagttcgagaccagcctgaccaacagggtgaaactttgtctctactaaaaatacaaaaattagccgggcatggtggtggcacctgcccgtaatctcagctactcgggaggctgaggcaggagaatcacttgaacccaggaggcagaggttgcagtgagcggagatagtgctactgcactgtagtctgagcgacagagtgagactccgtctcaaaaaaaaaaaaaaaaaaaaaaaaaagttgggataaatatctttaaataatccaaaagatggcagaaaaaaaaactaaacaggaaaagcaaacagagcagatgggacaaatatgaaacaaagagcaagatggtaggttaaaattcatatcaataattaattcaccattaagggccaggcagagtggctcatgcctgtaatcccagcattttgggaggtggattaggaggatcacttgaagccaggagtttgagaccagctttggaagccaagtgagactccatctctacaaaaaaaaaaaaaaaaaaaaaaattagccaggtgtggtggtgtagttccactcaggaggctacggtgggaggatcacttgagcccaggagtttgaggctacagtgagctctgatcacaccactgcactcctccagcctgggtgacagcgagattccatcttaaaaaaaaaaaatcctcattaaaagcagacattgtgagattggataaaaaagcaagacctatttatatttatatgctgtctacagttatcccactttgaatataaaaatacaaatacgttaaaagcaaaagagtggaaaaagatgttaatatgttaacattaatgaaaagaaaaccttagtggcatattaaacaaactatattttaaaatgaatgtcaccaaggataaaggagaattatttcataataataaagagatacattcatcaagacataattctaaatgtttatgcatgtattaacagagattcaaaatacaaacttttcaaggagaaataaatctgtaattatagttgaaggtttaacaactctctcacaaaaactgatagaacaagtagacaaaaatcagtgaggatatagaagatttggacaatataatcaactgacttgacttaattgatgttcagtagaacattcgacccctaaacagcagaatacacgttcttttcaagtgcatatggaactgtttccaagacaaatcattttctgggccattttaaaagcctcagtagacccggcgggttggctcacgcctgtaatcccagcactttgggaggccaaggcgggcggatcacctgaggtcaggagttcgagacaagcctggccaacgtggtgaaaccccgtctctacgaaaaataccaaaaattagctgtgtgtagtggtggatacctgtaatcccagctactcaggaggctgaggcaggagaatcacttgaacccgggaggcagaggttgcagtgagccgagattgcactactgcactccagctgggcaacagtgagactccgtctcgaaaaaaacaaacaaacaaaagcctcagtgaatgtaagctgattcaatttgtagaaagtatgatctctggccaggtgcggtggctcacgcctgtaatcccagcactttgggaggctgaggcgggcggatcacgaggtcaggagatcaagaccatcctggctaacatggtgaaaccccttctctactaaaaatacaaaaaatcagctgggcatggtggcgctcacctgtagtctcagctactcaggaggctgaggcaggagaatcacttgaacccgggaggatgaggttgcagtgagccgagatggtgtcactgcactccagcctggctgagagagcgagactccatctccaaaaaaaaaaaaaaaaaaaaaaaagaaagtatgatctctggccacaaggaattaaatgaggaattaataacagaaaggtatctggaagatctttcaaatatttggaaaataacataattttaagtaaatcatgggtcaaagaaaatcaacagcgaagtaagtaagtatctggaactgaatgaaggtgaaagtgccacataaaatttgtgtgatggagctaaagggaaatttatatagtgcagatggtccctgacttatgacgtctcaacttacatttttcaattttatgatgggtttttcaggatgtaacccaattttaagttgagcatctgtatcagaaaagaacaaaggtcccaaatcaatgaccttggggtcccacttttagaaattagaaaaaatgaagactagtgaaaccccaattaagcagaagaaaaagccagtgtggccaggcagggaggcccatgcctgtaatcccagcactttgggaggctgaggcgggcagatcacaaggtcaggagattgagatcatcccggccaacatggtgaaaccccgtctctactaaccatacaaaaattagctgggcgtggtggcgcttgcctgtgtaatcccagctactcaggaggctgaggcaggagaatcgctttaaccagggagtcggaggttgcagtgaaccgagatcgcgccattgcactccaccctagcgacagaacgagactccgtctcaaaaaaaaaagaaagaaagaaagaaaaagaaaaggccagtctggaaatcaatgaaacagaaaaccagtacagaaatcatgaaaccaaaagctagttatttgagagagcaatgaaactcataaacctctacccagactgatcaggggaaaaaagggaagacaataactgtaatatcagcagtgaaagagatgacatcacacagattctaaagatattgaaagtgtaataactgaatattgatcagcaatctagaagaaacagattccttgaatgacacaaactaccaaagttcactcaagaagtaaccatctgccgggcgcagtggcttacgcctgtaatcccagcactttggtaggccgaggtgggcggatcacgaggtcaggagaccgagaccatccttgctaacacggtgaaaccccgtctccactaaaaatacaaaaaattctccgggcgtggtggcgggcgcctgtagtcccagctactcaggaggctgaggcaggagaatggcttgaacctgggaggcggagcttgcagtgagccgagattgcaccactgcactccagcctgggtgacagagccagactctgtctcaaaaaaataaaataaaataaaaataaagtttagtaaaataaaaaaaatcagtaaaatacaaataaaatttagtaaaaataaagctgattctaaaatgcatgtgcaacagaggatctagagtagccaaaataagctcctctgtctgacttaaagtcttaattaaaataatcagacaggccgggcatggtggctcacgcctgtaatcccagcactttgggaggctgaggcaggtggatcacctgaggtcaggagttacaaaccagcctggccaacatggtgaaaccccatctctactaaaagtacaaaaattagtcaggcgtgatagcacacgcctgtaatcccagctactcaggaggctgaggcaggagaatcgcttgaacccgggaggcggaggttgcagtgagctgagatcatgccaccgcactccagcctgggcgacagagtgagactctcaaaataatgaaataaaaataaaaaactgaacttcatatcttgtccccagatctgatatagtcacttcttcctttgttcagttaaacccagcttcatgtttctgcttgcccagggccaataactttgggatcttccttgactcttctttttctgtcaaaccccgtaccagtctttcaggtaaccgtaacttcagagtctatccaggtcacctctgcttgtccaagcccctgtcatctctcacttggatgatttcattagcctcttggccagggtccctgcttctgctggtatttccttagtttcttctccctacagcagccagagctaatcattttaaatgtcatatttctgtctcgcctcagctgcaaaccttccagtaccttcccagctccttctaaataaacaccagaggccgggtgcagtggcttatgcctgtaatcccagcactttgggaggccaaggtgggcagatcacctgaggtcaggagttcgagaccagcctggccaacatggtgaaaccccctctctactaaaaatacaaaaattagctgggcgtgatggcgcctgtaatcccagctacttgggaggctgaggcaagagaatcgcctgaacccaggaggtggaggttgcagtgagccaagactgcgccactgcactccagcctgggcaacaagagtgagactctgtctcaaaaaatataaataaataaacaaacaagcaccagagccctggcagtcacctgtgaggcttcaccccgtctccccacccactataacctctgacttacctccttttacactccttcttgctgactctgttccttccacattggcctctttgctcttgcttgaatgatccccagtcatcctccctgcccagggcctttgcacttgctgttctctgccaggaaggtgcttcctccgtagttcactcttcacctcctttgggtctttgctcagttgtcatcttcagtgatggctcttctgatcaccttatttaatttttattttttaattaaaaattttttttgtggagatgtcttgctatgttgcccaggcttatctcaaactcctggactcaaacgatcctcctgcctcagcttcccaaagtgctgggattacaggtgtgagctaccacacccggccccgatcaccttatttaaaattgcagctcccagcccccaaccccagcatacccattcctctttttttttttttgagacagaatcttgctctgtctcaaattccctccagccatgagccctgaaatgaaacaagttatctatttccaaaacacaacagtggggcaggcataggatagacattcccattccaaaagggagcaataggcaagaagaaaggggtagctggtcccaagtaagtccaaaacctgagacagagtcttgctctatcgcccaggctggactgcagagtggtgcgatctcagctcactacaacctccgcctcccgggttcaagcgattctcctgcctcagcctcccaagtagctgggattagaggcatgcaccaccacacctggctaatttttgtagttttagtagaggcagggtttcaccatcttggccaggctggtctcaaactcctgaacctcaggtgattccccccgccttggcctcccaaagtgctgggattacaggcgtgagccaccgcctggtctccctcattccttttgttatcagtcatccctcccagccctggcaactgctgctcactttcctgaccttagaattttgcttattacagaatgtcatataagtagaattataaagtatctaagcttttaagtcctaatgcatttaagatctgtaaaaagtaaagtagaggttcctcttcaaagactttcctccccatctaattaggaataaatagtaacttctcttagaagaaaaatttattcaaagacctgtgctaacattcttaaatatctgctagccgtaataaagaaatcaatgtactttatattcttagctctcacaatttagcctaaatatttgccctggcatgcttatactggtccaagcaagcattaggtcatggcctgttcctcttccttatttgaaggtgtttttacctttctcagcactccacaagttacttcctccttcctttgttctcctctgcctttgcctcttttaaaaagttctaagttcctagccaatcaggacaaatacagaatgtgaggtcctgttccagccaatggaaactggacacagcagtagggtggacgcgtcaggttgtaaatgaccctgtctcctttgttcagtgtactctcatggcaaaactgctggtgagtgtaccctttctgcagaaagtaaaaaatggccttgctgaggaaattaaatttatgttcaagtgctttttcttcagggcaccagggaacaagcatttctaacagatccatatgtgtcgctgcatgtaatcagtggttcattcctttctattgctgagtagtgttccattgtatggatgtacccgtgtattgatccatccatccactgaaggatatttgagttgtttccagtttttttgtgattatgaataaagccactgtaagcattcacatagaggctttggtgtggacataagttttcatttctcttcggtaaataattaggagtagaattgctaggtcgtaggataagtatatgcttaacttaggagaccctgccacagtattttacaaagtaagggtgctattttgcattactaccagcagttcacaccatatgtattcacaccagttgctccatttggtcttcgttctgtgacttgtctctattctcttaacagtatctttagaacagcagaagtttttgattttgatgaaattcagtttatcgggccaggctgggtggcttatgcctataatcccagcactttgagagaccgaggagggtggatcacttgaggccaggagattgagaccagcttggccaacatggcgaaaccctgtctctactaaaaatataaaaattagccatacatcgtggcgcatgcctgtagttccagctactcaggagtctgaggcaggagaatcacttgaaccctggaggaagaggttgcagtgagctgagatcatactgctgcactccagcctgggcaacagagcaaaactccatttcaaaaaaaaataaaataaaatttcagtttatcagtgatttctcttaagtttcatgcattgggtattgtagctaagaaatcttcacctaactcaagtttacaaagattcttctgttttttttctagaagatttataagttttaatttaacttttaggcttataattcatttcacattaaatggtgtatgtggtgccaggtattgctcgagagtcatcatcttgcataggggtttcggatgttctagcaccatttgttcaacagatagcctcttttcattaaattgccctttcacctttgtggaagatcaattcagcatgcatgtatgggtcacttgtatgtttttaattgatttctaaattctgaaaggaaaatgataaaaaggaagattctttcactatatctgcatttccaatttctcccccaagaacgctttcctaacacctgcaggcagaactaaccactctgggcccctgtagctgttgtgcgtatgtttattattgagtttttctggcctttgcagttctttcagtgtctgattctccctctctctcagcttctttctcaagactgtgcatccttggaggtcagaaattgtctcatcctgccgggcgcgatggctcatgcctctaatcccagcactttgggaggccgaggcggttagatcacaaggtcaggagttcgagaccagcctggccaacatagtgaaaccctgtctctattaaaaatacaaaaattagctgagcgtggtggcacatgcctgtagtcccagctactcgggaggctgaggcaggagaatcgcttgaacccaggaggcggggaggttgtagtgagctgagattgtgccactgcactccagcctgggcaacagagcgagactccatctcaaaaataaataaataaataaaagacaaaataaattttctcatccttttttgtcatcttcatcacagctgcctctctaatgttcgttgaatgaaagggccattcccaaatctctgataagtcaagcatttttaggagagctaaaccagccaaatgagaccaggaagtgaagaaaaatacctttttttttttttttttttttttggagacggagcctcactttgtcacccaggccggagtgcagtggcacgatctgagctcactgcaacctccgcctcccaggttcaagcaattctattgcctcagcctccccagtagctgggactacgggcacacaccaccatgcccggctactttttttttgtatttttagtagagatggagtttcaccgtgctggccaggctggtgtcaaactcctgacctcgtgatccgcccgcctcagccttccaaagtgctgggattacacgcgtgagccaccgcgcccagctgaaaaatacctactttttttttttttttacagcaggaggtgtttctgcttctactttgctgtgacttctgtttctccaggcattcctggtatggacatttataccaggtgttttggtcattggtgggctctcagcttcagaggacacttggcttctctataccctatctttggtgacttctgcttgttggacttcagtcactgcagttcacaagtttcacactcatgaaatatttattgttaattaattccaatatttaattgattgcttctctttctcagcactttggaaacatgtttactacctagacattttcctacagtagatttttaattcttaacattttgatcttaagcaatttaccatgatacttggtttccatgagagatttaacagttggaactgtactgcccataagatgcaggtggggtcatggtatgtagttgggaactctacaaatggcagcccttcatgcctttgcaaaggctgcaggttggaaagctgccattacttgtgagggcgtccaaatgcttcctgtgaatggaagatgtgtttctgtgcctcactgtcttcactgtgctggattgctggctttctcagatgtctttatttgagtcaacctgtattccatctccccactcccacccagtcttgatcatctcatttgtgtgtatacaaccttcccctcacacacacctctttgcagagtttcgttgcactgggcgttgggaggagaggcgtcagagttgggtggaatcatttcaggctgactgtccagacatagctctcattagaagcatcagtaaataagctgaaaaccaacaacacgtacagcacagtctttctgtgtttgcagcttggaactgagcagccctcactgggtgcatttctaatcctttgtctcatcatttatatgacatccacttagaaaaaggtgttaaaatcatataacatattgctttttccccttttttattagcagttttactgaggtgtaatttatatgccataaaatttaccatttgaatgttcaattcaatgatttctactaaatttatagagtgtgcaccataaccacaatccagttttattttttatttttttttcgagacagagtctcactctgtcactcaagctggagtgcagtggtgcaatctcggctcactgcagcctccacctcccgggttcaagcgattctcctgcctcagcctcccgagtatctgggactacaggcacgtgccaccatgcccagctaagttttttgtattcttagtagagatagggtttcaccatgttagccaggatggtctcgatctcctgacctcatgatccgccagcctcagcctcccaaagtgctgggattacaggcgtgagccaccgcacctggccccacaatccagttttagaacatttccagcatccccaaaagatcccttttgtccctttgcagcagtcctacccccacttccagccccaggcgaccattcatttgctttttctatagatttgtcttttccgtacgtttcatgtaaatgaagttttatacaatatatgaccttttgtgactgttttttttcccagcatgtttttgaggtttatctgtattatagcacgtctcagtactttgttccctttttatcactgagtattattccattgtacggacatacatttttctctattcactagttggtgaacatttggattgtttccagttttggtcatcattaacaatgctactatatatatccatgtataagtctttgtgtggatatacattttcatttctctagggtagatttctagaagtaaaattgctgagtctttttttttttttttgagatggagttttgctcttgttgcctgggctggagtgcaatggcataatcttggctcactgcaacttccgcctccctggttcaagtgattctcctgcctcagcctcccgggtagctgggattacaggcatgtgctaccacacctggctattattattattattttttttttttttttttgagacagagtctcgctctgtcacccaggctggagtgcagtgcgcgatctcagctcactgcaagctctgcctcccgggttcatgccattctcccgcctcagcctcccaagtactgggactacaggcacccaccaccacccccggctaattttttgtatttttagtagagacgaggtttcactgtgttagccgggatgctctcactctcctgacctcgtgatctgcctgcctcggcctcccaaagtgctggcattacaggcgtgagccaccatgcctggcaaattttgtatttttagtagagacgaggtttcaccatgttgatcaggctggtctcaaactcctgacctcaggtgatccacccaccttggcctcccaaagtgttgggattacaggcgtgagccaccacgaccggtcaaattgctgtcttatagtaagtttatgtttaactttttaagaaactgccaaactatttcctaaagtgactgtaccatttacattcccaccagcaatgtgtgagtgttccagtttttccatgtccttgccaatagttggttttgtctgcctacctatccccgcccctgcttttttttttttttttttttttttaagagacagggtcttgctgtgttgttcaggctggcctcaaactcctgggctcaagtgctcctccctagtagctgggactataggcacacaccagtgtaccaggggttgtctgtcttttgattatagctattggaatgggtgtgaagcagcatctcgtgattttagtttccatttcttgaatgactaatgatactgaacatctttttatgtgcttattagccatttgtatttcatctttggtgacctgtcaattcaaatcttttgcctatttttttttattaagtttgtgcactgtcttattatcgagtggtaagagttctctgtattgtgggtacaagttcttttttttttcgagatggagtctcgctctgtcacccagggtggagtacagtggcacgatctcagctcactacaacctctgcctcctgggttcaagcgattcttctgcctcagcatcccaagtagctgggactacaggcttgcaccaccacacccagctaatttttgaatttttagtagagacgggatttcaccatcttggccagacgggtctcaaactactgacctcgtgatcctcccacctcggcctcccaaagtgctgggattacaggtgtgagccaccgtgcccggccttccaagttctttatcaggtatatgatagcacatgtagctttttatcttccttacaccagtgcaagtttatagaaaggaaaagggatagttaatagtaatcataataatgtttaatatttgaatgttttttaggagctggacactgggctgcatgtttcacggggatgatttgggtcactcttcaattttctaaaggttacaggactgtttcaaacacctctccttctattaacagttttcaatggagaaagaaaacaaaagattgatttggggaattcttaggttaatgcgagttagaactgaccttttaacattattaccataaggactaaatggctgttacagacccaaaataggagcaattcaaacaagcgagatgcttctctctgtaacaggctgacagtcgcggtcctggaggggcacgatggctcctcagggtcagacacctcctgtcccttactctgtaaggcacagcttctacctcaggatccaaaatgcccacgccagctgccatggcccctcacaggcagtggacaccagaaagaggagagggagtgcgtgcctgttgctttgaagaacctgacccagaagtcttacacagcacttttgcccacataccatcacttagtcatgtggtagtgcctggccacaagagagactgggaaatggagtctttattctggggtgatgtgtcccatctgcaactgaggggttaaggcctaaaacttagggattgaaggcaggagaaaaaacagatgtcgagagccagtgttgggattgcagggtcctgtgtgggattcctgttcattttcatcaaagaaagtctagttgatatgcaattgttggcctaagtgttattgaggagttaattttactgttgaattacaccagaacatttgtcatgtgaaataactataaatacgactgattattgcctagtgtattacagttctctccagagacacaggaaacaatagggtctgtctatcggaatagatatcctaaaagtgtatcttttgaagagattgattataaggtattggctcatgagatgatggagcttaagaagtcccacagtctgctctctgccagatggagacccaggaaagctgctggtgtagtttgaaggcctgagagctgagggccagtgatgtggattccagtctgaaggtctgagaacccagagggctgagggcaggagaagatccatgtcccagctcaagcaggcagagggagggtaaatccaaccttcctttttctgtttttttgttctaatcaggccctcaacggactggaggatgcccagccaaagtggggagggccatctgcttaggcagttcaccaattcaaatgctagtctcttctagaaacaccctcacagacacacctggaaataatgtttaagatctgggcatcctgggggtctagtcaagctgacacatacatttaaccaccacacttagggaatatgaaaataacttagacattaaatttgattttggtgttgctgtaaagaatacagatcttaggcaccagctcgtaggaggggtggtaaacaaggaggacagcttttaccaggttgcctttggaagcaaaactctgctttgctgttttgttttcaagcggctgcatggccactgagcgagccctttcctgccatcaccacagtgccacttagtgaacagtttctccaaggttaactgtagctgctcttgttcagttaatatgtagttctggattaatatgccacatctgtcactttaaggaagaaaaagagcagttccgtttagagatcccattgctcctctaaggacagcagtcatttctaacaagcagagggaagaaatcttctggttccatttgtcctttgtgtgtgttgaaaaccttgacaacaaaacaaattggtactgaatggtttgaagaaataaacattaactcccctttagtatttcatttctagggtttccagccttggtaacaattaccaagaactttgctgtcatggggtacagctctaggctgctgacaggatcttcatactggaggagactatacttttatagccaattccaactgccccagagataacttggataaacactggctcctccactacctcctaatccctgctgggttttacactgtggggaggtttagacaacttgttttctttcccttttagcccttctctctacactcccctccagctgccttcttcccccacccccaaatgtaacgtgatctcctaggcctgctctgctgcttttgcagattcttttagtcttagagaaagagaggaaaatattaaccattggtttaccaattcaaagttaacaacattttaaacaaaaggagcttgtcaataaccagggcttgggcttttcttttatcagttcctcctacttggctgagtttacctcatcataaatcttatcacacagataataatttgacagctttagggtttttgcagcattgctattttctattgcaacaaagctgtaacattgctatttttgatgtatttgttttatagatatcttaatcttcaatattcagattaaaaacaaacaagacttagtgatttaaaattatttggtaaaaaggtaaagggacagagacatctcatgaaaacatggcaaaatctctttaagtttaattcaagcacttagagtttaataagaatatcccaaaccatttttgcttaataatatttctgtttataattaaaccttaaggtacagtgttgtaactggatttaagaatttagagttttgttgtttcttcgccatcagcgaaattaagatttaaaacctatagtttgcaacaaattttagtttttcagcctagtgtcctaaaacttgtctgtcatgggtacctagtaggtgtcatgtcacaggaaagggatctaacaagggagtttgaagataggggttttccttgctctgccactaacttgctatgtgacctagggcaagttatataacctatctgtgtcacagttgtctgaaatgcaatatggggaaaataaattcttaaaatgacaataaaaagatttcttttttttttttgagacagagtcggcgcaatttcggctcactgcaacctccacctcctgggttcaggcgattctcctgtctgagcctcctgagtagctgggattacaggcacacaccaccacgcccagcaaatttttgtgtattttgtagagatggggtttcgccatgttggccaggctggtctcaaactcttgagctcaaacgatctacctgccttggcctcccaaagtgctgggattacaggcatgagccaccacgcctggccaaaatatatatatacatattttaagtgaagatgtgtaaggactaaaggagcccaaaggagacagtaggggataagaaaggcaaagagagtggtaatagatttagcagaatcaaggatgccaaaacctcttctgagagagaccttgattaagagtgagctggtttgcctgtaagaatctgcggaaaggtcagaaattagagacattagtaccacagaaagcaggggatgaggcctgaagctgaaatcaaggggatcaattgagagcctataaaaggagggtttagattcttcaaacccctcccaaccccacagagtcagatgaccacctctcctaaccacctacaggagaccagaggcattatattgagaaatgcccggccgggcgcggtggctcacgcctgtaatcccagcactttgggaggccgaggcgggcggatcacaaggtcaggagatcgagaccatcctggctaatgtggtgaaacaccatctctactaaaaatacaaaaaattagccgggcgtggtggcgggcgcctgtagtcccagctactcaggaggctgaggcaggagaatggcgtgaaccctgaaggcggagcttgcagtgagccgagatggcgccactgcactccagcctgggcaacagagcaagactccgcctcagaaaaaaaaaagaaaagaaatgccccgtagaggctctgcactcaggagcctgacccccagcatgggtccgggtaggccattggccgaaaatagtggagtgggcaaagagcagattttttaaaagtctgcatactgaatagtaagattcccagccctcttctaatacctgctagccaggggcctaataaggaagagattgaaatattcttttctagggggaaaaagttgaatgaccctagagaaaagccctacagataccaacatttagggattctcttgaaaaagcgagtttaccatctcctttcactgaagcttaccagtggctgtgccccttccacgcatacaaaactaacagtcatcttttagttgctcattcatagagagtgagtggcctgccaaatctctctaggcattagaggaaggtctctaacctgatattaatagataaagggtaaaacaaatagcagaaaacaggaacttggtggaaataaagacaatgcagtcaacagaggaagagtttaaaagaactattcagcttgggcaccatgactcacgcctgtaatcccaacactttgggaggctgaggtggacagttcacctgcggtcaggagtttgagaccagcttggccaacatagtgaaaccccatctccactaaaaatacaaaaattaactgaacatggtggcaggcacctgtaatcccagctattgggaggctgaggcaggagaattgcttgaacctgggaggcatagcttgcagtgagccaagattgcaccaccgcattccagcctgggtgacagagtgagactctgtctcaaaaataataaataaataaataaataaataaataaataaataaagctatgcatttcccacaaatactgcttaaaaaaaaaagaactattctttgctatccttggagagagagattgcaaatgtcagaaaacaggatgcttttaaaaacaataacaatcagaataagaataaaaatgaattatttttcttttatttatttatttatttatttttgatacatggtctctgtcacccaggctggagtgcagtggcaagatcacagctcactgcagccccaacctgcctcagccccccaagcaactgggactacaggcacgcaccaccacacctggctaatttttaaattttttgtagagagatggggtctcactatgttgcccaggctggtcttgaactcctgggctcaagtgatcctcctgcctcagcctccccccaaagggctgggattataggcatgagccaccacacccagcaagaatgaattgtttaatattaaaaacattatagcccaaatttaaaatccaacagaagatgtggaaaattgtctcagaatgtattgggttggtacaaaagtaattggggcttttgccattttaatgacaaaaacgttgattacttttacaccaacctaatagaacataaagacaaagacatggactgttgagagaacaataagagagaacaggtaagaaaattagaaactctcgggaggctgagacaggataatcgcttgaacccaggaggcagaagttgtagtgagccgagactgtgccattgcactcctgcctgggcaagcaacaagagtgaaactgcgtctcaaaaaaaaagaaaagaaaattagaaactcaatcccagggctttaatatcctttttgtaggaattccagaaagaaaacaaaaaaataatgataataacgaagaaacaaatggaggagaagttaggagacgttaaatgtaaggaaaaatttcagagtttagtgaagtgagtattttccaaaacagaattatataaatctctggatttatgagtgcccagaataatatatgaaaggccatatcattgtgaaagttcagaacaccaagaatattagaagatcctaaaagtttccaaagagaaaaaaagcaagtcattttaaggggtcaggaaccagaatgggattgcatctctaaacaatacttactggaaactagatagtagcagataaataaatgccttcaaagttcatttgggaaaattattttcaacctagaattctatacccagacaaactgtcaagatagaagaaaggtatttttttagacatgcaccctccctccccacctctgtgaagctactggatgatgaattccagcaaaatgaagaagtcagtcaataagtagaactgagcccgggcacggtggctcacacctgtaatcgcagcactttgggaggccgaggcgggcagatcacgaggtcaggagattgagaccatcctggtgtaacacagtgaaaccccgtctctactaaaaatacaaaaaaattagcagggcgtggtggcggtcccctgtagtccgagctactcgggaggctgaggcaggagaatggcgtggtgaacccgggaggcggagcttgcagtgggcggagatcgcgccactgcactcccgcctgggtgacagagcgagactacgtctcaaaaaaaaaaaaaaaaaaaaagtacaactgagaatatttgaaatgttttagtgattggaaaaaatatcactagatgtttgacagatctttgaagtatttgagggaaaatggtgataggtatatagaagactaaatgaaaacaaggcaatatctctaggataaacaaagatgtataataaaggaaacattcatagtatattattggctaagcagtgaagaatatttatatcatcctaataatgtaaacactaactattgatttatcccccaaattgtgattttattgttttggggggttatggatggtgatagtataatactgctgtcataagttaatagataatggataaatctaatgaattcagaaagagcaagatgatgttactagctaaaaatctgaaggaggctgtctctgcggaaacatacaggggaaagggattgctgttttttattaccagatttttacaagactatttttagccttttttacaagacttttagtactgcttgagttttaaccatgttatgtatattactttgattaaaaagaaaaattaatttaaaaaaatgagcatactaataccattaattttctccttctagagaaaaatgtttaacagttaggtttagacttgttaattataaaaatatagtagtcttactgtaatgagattttctagaaagcggatttactctaaggcagttcagatttggtccccagctgagaattatagcctggaaataccaacagaaaaatcagtgtcatttgaaggacagtcatctgtgcagcctgtgcatgaaatcatgggtctgaattaggcccccattcaagatgcgggggtgtggggtttgtgttttgctgaagctgtggttgcaaatctttgctttaggatgaaaggtggggctctctgttacatttgaaccttagttgctactcctacctcacagctagtgtttctttctcttcataaaataaattgatttcctggtcccttggaaaacctccagactgctttctggaatcattttcatatagcatgtttgttaatttgagctcttgactgagtcccagtgagatgtaggcaggaacacagacctgatacagaaatagtcctcttttggaaataacaatagctactgtttatcgagcaccttctgtgctttgggcactctccctacatgattcctaatcttcataataaccctgtgagataactactcttatgactacctcccatttttcagatgagaaaattgaggctctgagaggtgaagtcgttgcccatggccccacagtgagtggcagatctgagactcagcgctagcctttgtgacacataactcgtgaccagcaggtagtgctacccgattgaaaaaatgtgagacttaaagggatgcatgtgtccctatacagtggcaaaaactggtatgacagaagtgatgttttaagctatgttatcctttagttggacatacactggacccacagagctagagtacctggcaggctcttgctggacaatgtttgctgaatcagagaaagtgggctttgttggcatttgcatgtgaaatactgtgcacatacctcaagatctttgctgttccccccctaaagctactagctatgctggaaacagtgaaggggtcagccagacctggggtcaccttgtcctggggtcccaagccaggcctcctgtcaggttcatctgtctctgttccacctgcactcacacccagtcttgctgctgagagatggagcatccacatcctgaatcctgcctccttcccttgacacacttctatggtgggtgcctgcccaactttttcttaataggactaaattccaaattaaaaaaaaaattcagtctctctcctctaatcatccaagaagagtcctcttttggtaacttgttctagaactatgcctatcttaaattcagaaattgctttcaaatgaattaaattttagaaatatccattcctgttcgtcctattcccagtgaaaataagcaactcttccctcttccaaaacagtggatttcttttctttttttctttttttgaaatgtagtcttgctctgctgcccaggctggagtgcagtggtgcaatcttggcacactgcaacctccacctcccaggttcaagcgattctcctgcctcagcctctcgagtagctgggattacaggtgtgtaccaccatgcctggctaatttttgtatttttagtagagacaggatttccccatgttggccaggctggtctttaactcctgacctcaggtgatcgcccaccttagcctcccaaagtgctgggattacaggcgtgagctactgtgtctggcccccaaacagtggatttccatcttacatatgcatacagatcatctgggagcttcagatccagcccattacacatattctgattctagactagaaaccaagactccgcattttaagcaagccccacattattcaaaatagattgtccatggattatgcttttagaaacattgttcagatcccatgctttaatgttggggagtttatcctttccttctaaatattttttttttttttgagatggagtctcgctctgttgcccaggctggagtgtggtggtgcgatcactgctcactgcatcctccacctcccaggttcaagcaattctctgcctcagcctcccgagtagctgggattacagatgcccgctaccacgcccagctaatttttttgtacttttagtagagatggggtttcaccatctcaaaaaaaaaaaaaatcttaaatagctctagttccctgaattattttctcctaagacatgttttcccaacagttaatgttacttatttcatcttctgatcttactcatattatccacctttcacttaaattggaaattttctgccattttacaaagttcaagactttcctaccttcctacctcctggctgtgtgaacttggacagaatacttccccctctccctccagtcagttttcttacttgtgaaatggaattaaactatacaaaatcattaggttactgtgaggcttaagagtgcctggcacatattacatgcacattaaaaatgtatttcttcccaaactaatgcaacatagcaaacaagttagttcacagtctttaatttctttccttttccctttctttttagctaatagcttttgggtcttaggctgattagaaggaatccttcttggggtgttcttctggtaagaagattgaagctctcctttatttgcttgtaacagaatgctcttcgtatctttcaaaagcgtcaaaagctggatatggaaagtataggccaggtttgatacagaagtgtagtttggcagttttttcagtatccattgccactaattcagtattttgttagatctgttgatgtatggttttataactaaaattaaaaagatttgggtacagtttataagcattattcattttaagaggatttaagaggataagatcattttagactcaagagcagaatattagtaataataattagcttaaaaaaataaacatataccaatataaagaacagcacaaggcaagcaaatatctgggcctatattaacagacggtattcaaggatatggctagaatttccaaaatgcctaataatgtgtaattcttggcattaagccgccaatttgaatatggccctttaatatgaaatgctatataatgacagactttattatagtctgatccaaggcccctgaactttccaaaagggcaacaaaacagacagatactgtattttttcactagttggtactggtggcacccttttgagtgttatttttggcattacgtgtagaggttgacagattcaagacaacactaaacatgttagcagtcaccacacgcaggctgtccagcagaatgacagcgcttcccagatcctagaaagcatccagagtcactgcacccatcccctgggggccctgtagtcctgcatctccagatgatgggagctgcaaacttccctgatggtgccctcttggatgctcatgaggcctgatctggtaccacgactctagcagtaggtccattcaatggcagtaaaaatacatgttgtatgttgatcagaatttggcaggacacatgtggaaagttaatgacatcctggccgagaacccctgtgatatacactggttacatcctgtccaactggagtttttatgtgctgtttttggcagagccaagtgaagatcttgttacttagccattcctgaggtactgaagatacccgggtttttgtcattacaggataggctagaaagtagccagggtctcataaccaaggctttctctgaaacatataatgacaatgctagttatttgaccaaagatatccaatgctttaatccacttggaatttattcttgatgtgaagggtcagcatcatccactggtcgggagcctgatccttggagccaggcagacctgggttgagtccatctccgcctgtttccagctgtgggcaaggtgtctgacttctctgagcatctgtggggtttgtttgtttttaaacctgaagaattgggataatctgtttcctcacagaatcattacgcagatgcaatacagttaatgaaggtaacatggcacataggaagagcacaatacacgtcagctcttactcttcatggctagaagatgtggactaaacttccccctttacagttttgtgattaacaccatttatgaaagaaataaatgaaataaattccttttcctgtcatgaggggaacttacctgattttattgaattatttggtgccattgagttccttattgtttccctctgacctagatttctgggtgtgcgccagtaacacgactgtgattgttgctgctttataacattgtctgtggtcagtccaaacaagagtttaaaataattgaatgaaatggattttaaacaatggtccccccaccctcaccccgtggcactcggccaaaggaagaggaaaagttctctgttaaagaaaatgaatcagagaagaggcccagaccgtgcctccgaaaattctcattgtagggactaagtcctctcactctgaactcacacccgtctgttcgcagcctgacctcatatcctggtctggatgtgcggcctcaccggggtgtcgtgcgcacgtgtggttgtcctgtgggtgccagctctgacttcctccccagacacccactgcctcagccttaatcacaggacgcgcgttgagtagaaatgagaccagttagtattggtaactgcagaggaatatgcattttcaccagcgttctcgggtcagagggtttgcctggcaccgcgtactgggaaactcgccaaaagcggtgcaggttggagacgccccaggccgcggtggagttgcgcgcggcttctaaagtggagtggagcaggcctgcaccctccccgccggggctgggacggcgcttccaggcggagaaagacctccgcgggccgcgcgcggccttccccctgcgaggatcgccattggcccgggttggctttggaaagcggcggtggctttgggccgggctcggcctcgggaacgccaggggcccctgggtgcggacgggcgcggccaggagggggttaaggcgcaggcggcggcggggcgggggcgggcctggcgggcgccctctccgggccctttgttaacaggcgcgtcccggccaggcggagacgcggccgcggccatgggcgggcgcgggcgcgcggggcggcggtgagggcggctggcggggccgggggcgccgggggggcgcgcgggccgagccgggcctgagccgggcccgcggaccgagctgggagaggggttccggcccccgacgtgctggcgcgggaaaatgttggagatctgcctgaagctggtgggctgcaaatccaagaaggggctgtcctcgtcctccagctgttatctggaaggtaagcccgggccgcacgggttgggctgagtagccgcgcgccctcccgctgctgctgggcccttcctaggcctcgccgcccgcgcgctcccgcctgcgccctccccgggtcttgtcttttttttctttcttccctcttctcttctcttctcttcagttctcttatattctgtctctctttctttctctctgtgtctgtctcttttctcttctcttgtctctctctttttctctctctctgtctctttctctttctcgcgatggcccctaggcgccgccggcggagcgtggcccccagccccggcaccagccccggtagagccacgccggatggtgacggcggcgtccggggccccacagtgcgggctcccccgaaaaagtttgagaaagccaactcgccaggccttaacatccctgggatcccacgttgtggaatttccaccgttaattgggactgtgtgttaaaaagatcgacccgtgtttgtgaaaacatgcgatttccattaagcatcatgtacacaaggagcaccactctaccatttatggatacagaatttcaagtgatctttccatctcccccacccccatcttatctacagaccacgaagaggtcttaggaattcgctctcttttcaggggaggggagcccatttaagaaggcgtttccaaggagtcccccagagtactggggtgtcatgttcgtttccttaagtgaagctcagggccaggagggcttcacttttgcgttctttctacctactctccttctctaattacatctgttttattttatttttctttcctgttgtagtctttagttttataaatggaaaaaaagtaaattaagggttatgggtcttcactttcgtagcttctaggtgggtatgaaattgatctgatttgagactggtgctcccagaccattgccttcagcagaaaggctatctgtgcttcagagatggagtggcacttggacttctctgttgttttcaactaagaatataagagtaaaaatgtggccgggcgcggtggctcaagcctgtaatcccaacactttgggaggccgagacgggtggattatttgaggtcaggatttcgagaccagcctggccaacatggtgaaaccctatttctactaaaaatacaaaaaattagccgggcgtggtggtacacgcctgtaatcccagctactcgggaggctgaggcaggagaattgcttgaacccggcagggggaggttgcagtgagccaagatcgcgccactgcactccagcctgggcgacacagcaagactcggtctcaaaaaaaaaaaaaaaaaaaaaagagtagaaagaaatgtgaagctcactttagatcaagtaggatttctgctagaatgccatgtttttctttttaaaaaagcaggagaaataaacaggcctcatttattttctaacctatttttctttccttaacctctgactctaccctgaaggcctgcttggagtcacatatgcagatcgcactagtgatgtgggtgaaacctgtttgcccttcttgccacagtttgtgtacctcactcctcttctgtctctgggattccagggggctgaatggcccagagaaggctcatctaggtggagtgggctcacagagcctagcatttggagggtggagattgtttatttgtccctaaaagttgatgtctgagcattccaaatcatcttcaattaatacatcgcttattttttccaagttgctcaaaattctgagcacattctcatttacatctgtatcgagttagtgttaggcatcatcatctccactttgcagatgggtgcctaaggcggggatgaatggacttttgtaagtgcagagctggagcaaagtttaggtcacagctttgccaagtcattgttttgttttcctgggagtaaaccggagatttagtatggacctggctggtttaattattgttttgggaaaaaaatctaaaactcattccaacatgtcttgaaatgaattataatgttgactctaaagtctcaaaaaaaaaaaaaagttctagtacagcagactgccttgggttaaaccttcttctaggaaggtgtcactctaggaattctttcttactgagttttcttcttttcgttgttatagttaattagagaaagtaaatggaattatcattttgtagttggtagactttaacaagcctcagcgatagtcttttaaagactggaagtgctatttgtcttttgggaaaaatagttcctaacatctggatgagtaatccaggctttccactttcactgacagcctaaatcagtcaatcagtgtcgatcagtcagtcagtgtttattgacgcccactcagggtcccaggcattccctgtcagggagagaattgaatgagatcaagtttttcattgttctatcaaagaagcttccaccataaatgtggtttgatggtgcatgctacctgctactcagcctagctgtcaaagcaacactggtaaacataaagatggctagcaattattaaatgcttactatgtgccaaatactgttttattactctatgtgatctgatatagttatatttcatgatagcactatgattatttccattttatagatgaggaaactgagtcaccaaaaggttaggtaacttgtctagggtcacagagccagtgagtgggggtactggaatttgaactcatgctatctggcttgggagagcccacttttagccactggatgctctactgatgtctcttttggaattcactgtgattttcaaaatggtatctccagaaactcctccaattaatccctgaaatgtaagggtagtctctttttcttttctagaaacctgatcctggcaaaatgattagctttaacagtaggattaattttttttaaatgtatataaaaatacttgtatgtaagaaatcctaaaagggtatttagtgaaaagtaattccctctcctattcattttccccacctagaggcaatcaccctggagttttatgtgtgtccttctagaaatactgtgtgcacatataagcatttattataacatgtgaattttgctctccagctttttgtgaatatgcatgtttatagcagtatctattcaccaggaccgcatttagctttgcaatattcggtctactttgaacactgaattttctgattatttctttcccctggagacgtcaaagaaaacatgaacactagccttttgaattcagggttttcttttcattttattttcatttgttcatgtgtttgtatttacatacattgtgcctgaatattgtacatgtatgtgacagttgtgtactgtagaatcaaaaactaatgtctgtgaactgaactcttcttgaactttttgttgttgttgttattgttgcttttggagatagggtcttgctctgtcacccaggctggactgcagtggcacaatcacagctcactgcagccttgagctcctggtctcaagcaaccctcccacctcagcctcccaagtagctggggctgcaggcatatgctacctgactaattaaaattttttttttttttttgtagagacagggtctcactatttttactagtttgcccgggccaagccagtgttgaactactggcctcaagtgatcctcccaccttggcctccccaaagtgcatccctacaggcatgagccactgcactcagcctgaactttcgaaatttattttaagggcccacttttaaatgcttcttttcagcagctaactttccagcggatgcttcatgtggtgccagccatacagatacgcttttagaacttgagctttggagaagcttatgcttgctttctgctctctcctgaggtcatcagatacttcccttgttcagtaacaaagaaagtgagactctttctgttacctaataaaaggccagtctgtccatttcattttgggtgctattaacattgttgaccatttacaatgtcacaggccctggcactgagcacatcatgtgcagcctcacttaattttcacaccagtgccctgaggtttctagaaaagaggaagggccccagtttaggtggcagtacttttcaatttggaggcaggagatcccagttttcctctgacctctctgagcttccgtgtttttacctctaagacagagagaccaatctctgttcagccaccttagaggattgttttgagggtctataagatgattgagggaaagctctgaaactggtaagagttaaatgtatgtttgtgttatgttgatacgagattcctctgagatgctctttagtccaggcaggtttatggctcacacagcgttcctagggtctcattcttctgcacaggcaggcagctcccgagccagccagtctggacccaaatgccacctgtgctcttggctggtcttgcgcattcaccgaggctcactgtaccttggtgttcccatttctaaaataaggcctgtagtaatccctacctcactgagttgttgagagacttcatgtaaattgtttagcagggagcctggcacagaacaagagcctagcagaaaagtaagctgttgttactttaagcaaatatttagcagcctaaaatggtggctttaccagtttctgtaatggttgaagtgatgacagaattcagccaatcccacccatagtttttcttgctaataaagcagtttgtttctaagtgtgttttgatgcgtataattaatacttcctgtccttgatttttggctgaaaaatgtcttctcttcctcgcaccctctgttattcccgtagtgaatattttcattgtggaagagaaattcccattggctcatggttggcattttatttctcctgtccagagacaatatttccacagcctcaaacgtgaaaactgaaaatctggtgccacttaccaccttgtaaaatcaagtcattgtaattgtgccagtataatcattgatctgaaataaaagcagaaaataaatcaatgggtagctttcttaaatacataagaactaaagatcaaatgggatattggaagactttaacttttcctccataatggtggatcttaattaaacacacagaagaacaatttataaaataaattcataggtttgtttgttcttttttagtgtcaatttttaaaactatctcttttttaattaaaaaaaatagagatgggtctcactatgtcgcccaggctggtctcaaactcctgggctcaagcaatcctcccacctcagcctcccaaagtgctgggattacaggcatgagccactgcacccagcctaaaactgtctcaaaagtagacagcataatgaactcccatgtacttatgatgtggctttaacaattatcagcttatagtcagtcttgttttcttacataataaagttacagtttcaaagccattaggaagaatagcttgctaattataattacttagttttgatagtgtaactttgtcctcagatgggtagaatcgttactctggaacaggggtgtccaatcttggcttccctgggccacattgggagaaaaattgtcttgggccacacgtaaaacatactaacgatagctgatgagctaaaccaacaaaacaaatcccacaaaaatctcatttctttttttttttgagacaagagtctcactctgtcgcccagactggagtgcagttgcacgatctcagctcactgcaagctccgcctcctgggttcacgccattctcctgcctcagcctccctagtagagggtactacaggcgcccgggggtttcaccatgttagccaggatggtctccatctcctgacctcgtgatccgcccacctcggcctcccaaagccctgggattacaggcgtgagccactgcaccgggccaaaaatcttataatgtttttaagaaagtttgcaaatttgttaggccacattcaaagccgtcctgggccatatgcagcccgtgggccatgggttgaacaagcttgctctagaaattggttttcaggccgggcgcggtggctgacgcctgtaatcccagcactttgggaggccgaggcaggtggtcacctgaggtcaggagttcgagaccagcctggccaacatgctgaaaccctgtctctactaaaaatataaaaaattagccaggcgtagtggggagtgcctgtaatcccagctactcaggaggctaaggcaggagaattacttgaacctgggaggcagaggttgcagtgagccgcgatctcaccattgtactccagcctgggcaacgagcaaaaactccagctcaaaaaaaaaagttggttttcaaatccttctttctttaccatgttacaccataaatatttttgttatattgcgtgtgttgagtactggtgatagggaagacagagagaaataggtgggaaggagatagagagagagagagggagggaggaaggggagacataagggggaaatctatagagacagagactgagagacaaatacaaaaaggttgagacaggaaagggaaaaaaaaacaagctgggagggaaggaagactgagagaagggagacaaagaggaataggatggccagtggggctggggtgggtgggtacagagagagaatgagtgagagcaagagaagcgcaggagacagatgatggacaggcagctgatgtatggatgggtagctggagagagaggccatcagtaacttcacatctctctgtttccatttcctgccctcaaatgccttcataatagagtctacgtaataaggttatagggattcagtgcagatgaagtgctggcacttgatacgggatcagtaagtattagctattattctatcacattaagttgcataaactttaacctcattactcttaaattctctatagaaacctagtctttatctgtcttacaagccctcaaatttagctaatagcgttgttcattgaataccttaaaattgtatttaaagacaggccgtgaatacaattaggcattgctttttgaagccaaaataccatgagggtggggagggtcatgttcatttacccagatcagcaataaaaatactaatggctaacaaggctttctggggaaattgcctgtcattgggtagcccagtgcctctggtgtcagctgaccccggagtccatgaagacatgttaaaagaagaggaaatgtgaatgctttcaaaccagccatggctggcagcagaaggggaggcctttcagtctgttgcaaatggcctgtgacaataaaaatgcctttgtgggtattagcaggctgactgtggacagtctggatctgcggccactgcagggattcctggaacctgttgggaaggtgtccggcgagctcactgtggtgtctgttaggaatctggagcaaatcctatttcttttgaaagcacagagaactgtgtttttacattatacctttaggattttggccatggtttatatttcagtcaaaacaaatcattatgttccctaggcttttatataggttttcctggtcaggttgcatttgtttttcaactttactatctgtcattattgctgctcttattacaggttaacagattattaaactgcacttttcagtaccttgtagctaaagacagacaagtgcagggtgttccacatctgagttcacccagcagtgctgtgttgttgcgttgcactgagcaggcacagaaggctctgagatatgagagacttggtctctaccccagaggagtttacattgttgtggtggcagaagagaaggcgtggcataagagaagacgcggttgttctgtagtgagcatcccagtgtcaggtgccacagttggcatccatgcagaaattctctgcatgcaggattcattgagccctcccgacagcccaactaggttgatgccatgccgttgttgccctgttgtgcagttgagaaactgaggctcagaaacaaatgtcttcaagacatgctggtgctgaggtttgaacaaggcctgtccacccagagcccatgctttttgtactgctggggacatgtgaacagattgcttactgggtgatagatgcagggtggtgatagagacagacaccaggtacccaaatgggttaaaggagaagcatcctgttgtgggcgaggtgatggggaggaggaaggaccggttagagaaggtttatgggagatggggaggccaggaagagcagaagaggctggggaacgaactctagggagagtaaatggcacttgtcacagtgcagtcaggagaggcaagcaacaggaggcctgggggatctgaaaggagtttggagaggctggaatggaaagcaggagtagagggccagatgctcccagtctcaaccctgaagagcctggcatgcctgcttcaggagctcagacttttactatagtggtggaaggaataacaaccccagccattttttgagggcctgtgcatgcctaggccctcaaaaacatgtcccatgttagctgcaaactgccagctaccctgcaaagcacatcatgatcccagcattgcccccgatgacactgccagtaagtggtagctgaccattgggagacagggccacctcccaagcccatgctctcttctgcctctcggctggcagccatctctaagggatttgaagcaagagagtgacctggtcaggtctgcatttgagaaagatggccctgatagtagggagtggaggtggaatggccaaagggggacccagccaagggcgtggtagagcatggaaaggacagaagtgatgagagattgaggaggaaaagtgccaagatgcagggtgggaactgacagaggatgacttccagcctcagtcctgatatgggcgtcaatggcaggtgttcagaatggccttgaagatagtggcatctctatttatgagtgtctttgtactccatttccagtaattggagactttttcaccgtagattcttggaaggtgacacaattttttttttttcctttttggttgagggagggggacagggactgtgtatcttcagaaaggttaatatttgaggccaaggcaggcagatcacttgaggtcaggagttcaagaccagcctggccaacatggtgaaaccccgtctttactaaagatataaaaattagctgggcatggtggtaggcgcctgtaatcctagctactcaggaggttgaggcaggagactcacttgaacccgggaggcggaggttgaagtgagccaagatcgcgccaccgcactccagcctgaatgacaagagtgaaactcggtttccccaccaaacaaaaaaagaaatacctagtttctaccagagacagtcacaggcactgtacttctactctggtttgttacctgtgttcttaaaaaaattaaatgctacattttagtaagaggttagtgaaataaaattttaatttttcccatcagaggacatggagcccttgaattctatcccagactcccagggtcttccaggttaacaagtcctgcactaaggaattggctcagtaaaacctcagcattctcacaggaagagcctaaaaaggagactgggataaattagtgagaggtccaaattatgcaattttcttttaaaataaatgcagttttattactttccacttgtagccattataggcagtagattaaatgagtttctagagaaacctcctttaaaaataaagttatttaattagtccaaggtttaaatatttcccctggaatcttttacatgacaatgtcttagccagacaatttttaagaaacaaaattctccatcctaactcctatccccatcaacagtccaaatcttaacctttctttttttttttttagacagagtcgagctctgttgcccaggctggagcgtggtgatgcaatcttggctcactgcaacctccaccttccgggttcaagcgaaacccctgcctcagcctcccgagtagctgggactgcagatgtgcaccaccacgcccagctaattgttgtatttttagtagagacgtggtttagtagagacgacctcccaaagtgctgggattacaggagtgagccaccacacctggccagaaaccaggtgtttgatatcaggtgacggttgtgatcattgttcgcaccactactttgaaatgacatagttgccactggaccttgttatttaatgtgcgaataaagagacagttatttaaggcattaataagagctatattacaagtttttaaaagtcttttgaggactgtttcaaaaagtcttttgaggactgttctcctttgcaatcctctgtaaatgcaccattgcattccaacccgggcaacaagagcaaaactctatctaaaaaaaaaaaaattcatccacaggacagcgctggccttccgttagacttttgctgttgagtctgtaagttttcagcagctgtgtttctccaaggagcggggctactgctggttctttacgtctttcccccactgccctgcccctccctgcaccctagcagctgacacagtgttttgggatttgaagataacacaaaggctgtgttcagttaaacgtatgtctgtgtgtgtgtgtgtgtgtgtgtgtgtgcttgtgtgtgtgtgtgttttaataattttaacttctctgggtgaaggtgtaaattacaaaataaaggaccatgtagaaatagataaaatgactttcatcaagctcaaaatgtgggaaataatacttttcctctaagctcatattttgaaaagttgtttgagactgttataaaataacttgagaatagtctgagcatgatctcatccgctggaacggagtatgaaataaaacacgaagcctctttttagaaggatctgttttatagatttttaaattacagagattccttgaactggaggataatagcgaaggacccacaaaggaaatatgaataaagcagcacaagtttaaataattgaatgtgagcaaaattaaagggaacgtttgtcacgtctgacatgctccatcctcctgtcccccccacactgaaccgtctccaagaaccttccggagagcccacagtgtgaacagtaatgaatgctccatagctggccgccttgcactctagtgggaactatgatgttgggcacaagtgccagcaggaaggtgggaagcttcccggggatgtttttcctggaggtcaagtccccccttgggctgtgaagtagccggtactggggttcatgggcatttcccttccctgactgttcgccagcgtctggcacagcaccagcagcccctggaagtctaggccagatatgccatgtccgagaatcttttgtaaacatttttcatcagtgactcacagctttgagaaaggattatttttatataaaacgatctttcaattttactttaaagacccaaaccattttcttagaatactgtctaaacaagttaatcatgcacagatccagtgaattctgtggcctggttcttataaaatttccaaataattttatactgtcatagacagagccagagctttttagaggtttgaggcattttttagatgtattactgttctcggtgctcaactagctaattagtgattttttctgagtttagttggtgagtggaaacctttttgttaacattatgacaaaataacaatatggttttaagtggagtgagaggcacttttgaagatccagatcttagatccagatcttaaatctgtttaaagtatgactcagaaaggaggctgcagaaaatgttcactaaaaaaatttaagaataatagcagatgctaaaatttatttcccaagacaatagccaaaaagatctgctggaagaacagaagaagggaactagttggggcatcttttttttttgaatgaagccttcagccttctttaggggaatcttgcttcctgacagagggaccggtggaaagtttgtgtcttaagcaagaaagatttaagtacattctgcaactttggccttgtaagctgtgatcatttttaaggttgacgagcatagttcactatgaaatgaagcaagtaacttggcatttatacattgtgagtcaattttgacatcagcctggattgggaattgactggaaggttttggtgttggactgtggctacacttcagtgtctcggtccagaggcatgcatgagcaatacttccctttgggctttagccattaatttgtggaatagagcaagaactggagaggaaagtcgagagactgccttggatcgcctgacgtcctgttgaatcaaaaagcagtgggaggccctttccttcctaacaaaggcctcatcctcttgcataacattcccagcatctgtcgacatgttcgggaccatcccactttaacccacacttcaagtggatggccacctctgggcggggatctgcattctgcttattccaggtgttttccaggccacttccccgattatgtaactttgatcaaatccagatgcggcagaatgtttgatagaagaggtcaaatggcatttgagaagaaaagcatttctgtattcatgactttggtttaatttcctgtgtgggcctggtctgccaaagttgtatgctcatggccacgaggttgacgcaccagagggaggcactcaagtgccttttcaggacagcctgaaggaagcctccctccccagcatgctttttcatgttaaattatcaattatgtaagtttagggccaggcgcggtggctcctgcctgtaatcccagcactttgggaggctgaggtgagtagatcacttgagaccaggagttcaagaccagcctggccaacatggcaaaaccccgtctctactgaaaatgaaaaaaaaaaaaaaaaaaaaaacttagccaggcgcagtggctcacatctgtaatcccagctactcaggaggctgaggcaggagaatcacgtgaacctgggagctggaggttgcagtgagcctagatcgcaccactgcacttcagcctgggcgatggagtgagactccaactcaaaaaaaaaaaaaaaaaaatttcaattggcttctattaaagcttttttatgtttgtcattgttttctagtaataacaacaatccacattttttgtgagaaatataccataatatagagaagtataaagaaaatgtaaggccagacacggtggctcacgccgataatcccagcactttgggaggctgaggcaggcttatcacctgaggtcaggagttcgaaaccagcctggccaacatggtgaaaccccatctctactaaaaatacaaaaaaagtagccgagtgtggtggcgggcacctgtaatcccagctactcaggaggctgaggcaggagaattgcttgaacccggaaggtgaaggttgcagtgagcagagatcacgccattgcactccagcctgagtgtcaagaacgagactccgtctcgagaaaaaaaaaaaagaaaagtaaatttaaagcacttaaaatcccaccaccctgagttaactactgttcacagtttggtgaaattcctcctcgtcttctattttttcatagttgggaccatgcctatatactggaatgtaatataaacacttaatatattattgcgagtatattctcaaacttaaatattttttccaaaaatattttgagtggcttttaaaatatatcctattttatgcatgcagcataaactaacttatcctgtgttgatagatattttgtacttgcccttttctgtgctgttgtttaaaattagtgtatagaaataattgtgttgatcacttaggataaattcctagaggtaaatcagatattaaattctttatagacttctggttcatattccagttgccctcaatttatacacctactactagcattgtatgagagtgcccgtttctctgaaatcttacccacactggctgtcagcgtcaaaaagatgtatctgcagatttggcaaggaatttgcatttcagtgattattatcaagcgttcacacactttccatgtttaatggtaattttttttgtttttttttgagacgatgtctcactctgttgcccaggcagagtgcagtgccgcgaccttggctcactgcaacctctgcctcccaggttcaggtgattctcctgcctcaactccttagcagcttggattacaggcatgcgccaccatgcccggctaatttgtgtatttttagtagagacggggtttcaccatattggccaggttagtctcaaactcctgacctcaagtgattgcccgccttggcctcccgaagtggtgggattacaggtgtgagccaccgcacctggcctttaatgataatgtaaattttttgtgaattgtttattcgtggctttgccccattttttccatagtggagggatttttctttttcttgttggtatgtaaagtccttgtgtgtcaagaatgctctgcctcacagtttttctaatataatgacagtggaagctcgtaactggcttccacttgactgacttgctaaattgaccggcactcttcacttccttataaaacatgcctccatagtccctgtgccccatggcacatgggatggggtagccacactaccactgtctgctgctgcatatgttcctgtccacaagagccagtcatgtttgtttccaagcctggttctttcagatatagctgttgttgtaattacttggttgatatgaaaccaatgaaatgcaagtgtgaaaagagaattgtttctaggaaaattaagatgaatgctttagaaagactcagtaaaggaagataaatttaacaaattactacagaattaggtgtaagacaacagtaaatgattggaatgaattacagaaatctagaaagctttgacagtgggaatgcgtagtgaatggctctaagttctccctccatctgtaggaaattgaagctggaagtgagatgatatattcattatagggaggacttacagaagaaaacatcaagctctaatcacatgtccacatttcgttttgtttacttattttttgaaatggagtctcactctgttgcccaggctggagtgcagtggcatgatctcagcttactacaacctctgcctcctgtgttcaagcgattctcgtgcctcagcatcctgagtagttggggctacaggtgtgcaccaccacgcccaactaatttttatatttttagtagagacggggtttcgctatgttggccagcatggtcttaaactcctgacctcaggtgatctgcctgcctcggcctcccaaagtgctgggataacaggcatgagccaccgcacccagccccacatacctacatttcaaaggacagtctttggccctacagtcaagactaccaaaccaatgtacactaaatgggggtggggatcacgttgttgttttttgtttgtttttgtttgtttgtttgtttgtttgtttttttgagagagtctcgctctgtcacccaggctggagtatagtggcgtgatctcggctccctgcaagctccgcctcccgggttcacgccattctcctgcctcagcctcccgagtagctgggactacaggtgcccgccaccacgcccagctaatttttttgtatttttagtagagacggggcttcaccgtgttagtcaggatggtctcgatctcctgacctcggggatcacatattttaataaaattgataatccctaatagtgatggcgctaggtgtacttttagagccaatgtaaatagtcgagaaagggggccaaacatatgactaagcttcttctacactctaggagatgtcagtattgcaagatcctgttccttgaaattatctttgccccccgccattcagaaaaattaccaaatattgtaataatgtaatttaggacttaccctttcagagaaacagttcctgaaggttgacttcagttagtagtacagaagcgagacttgaagctcttcatggtttatgttctgttggtttatcccaaagagatgttttagagcacattcatttctgaaagttctcggtcatgtttccggaagtttgatcaggtgggttctttttctttttttaaaagataattttttttttaaagataattcagaatcagtcccacccctgagatggtattattacccaggaaagaatgcgtgaggatcctctaaatccatagagaaggaaaactaaaacaattttgttaccatttgtttggctcaagcatctggtagatccttcagttcttttcaaattagaattttcctctctttttcttttttttttttttttttgagatggagtcttactccatttcccaggctggagtacagtggcacaatctcggctcactgcagcctcacctcccgggttcaggcaattctccggcctcagtctcctgagtagctgggattacaggtacccgccactaattttcatatttttgcctggctaatttttgtgtttttagtagagatggggttttgccatgttggccaggctggtctcgaactcctgacctcaggtgatctgcccacctcagcctcccaaaatgctgggattacaggggtgagcctccacgccgggcctctctttttaagataataaaaattactaaacatcataatgacatgatttgggattactctttcagagaaacagttcctaaaggtttacttcagttagtgatttttatttttattatttatttattttttgagatggagtctcactctgtctgccaggctagagtgcagagacgagatctcagctcactgcaacctccgcctcccagactcaagcgattctcctacctcagcctcctgagtagctgggactagtagctggaactacaggcgcccgccaccatgcccggctagttttttctattttagtagtgacggggtttcaccgtgttgcccaggttggttttgaactcctgagctcaggctcaggcaatctgcctgcctcagcctcccaatgttctagggttacaggcatgagctactgtgcctggcccagttagtgatttttaaattgtagttccttaaatgagtattttggatttcactccacaatgttcttcaactgtaagatctacttgaggttatttgatttgctggtttgcaagaactcgtctacacgttgtctttatcacaaagaaattctggagcgtttgagccctgttcaaaaaaaaaaggcaagaagaaacttcaggaacaaataacctatttgaccctgtaatgaataatattcacacattttctaatttaagagctgttgattgatttccaacttttagaatctgtttcagacaaaacatggaagtttagtaacagttttttctattctgtaataataattgccacaaggttaaaaaaaaaaatttacagaagaacatatttgagggtggtcgtgggggcaagaaagctggaaggacgggtggggtgtgttaatagccttgtcttgtgaagtaagtcctcagagacgctgtcctagttggaagaacaggcagtgaaggtgtgcgtctgttacggagaataggactccagtgatctagctggtacttagagaggtgggggtgatcaccaaaaaaacagctctgcctctgggagcggagaggactgggatagaaagtatttgtctttcattttaagcccttctgtacgatttgacttttctttttttttttttttttttttttgagatggagtctcactctgtcacccaggctggagtacagtggcacgatcttggctcactgcaacctccgcctcccaggttcaagcaattctcctgcctcagcctcccaagtagctgggactacaggcacctgccaccatgcccggctgatttttgtatttgtagtaaagacaggatttcactgtgttggtcaggttggtcttgaactcctgacctcatgatccacccccggcttttttttttgacacggagtttctcgttacccaggctggagtgcagtggcgcaatctctgctcactgagacctccacctcctgggttcaagcgattctcctgcctcagcctcctgagtagctgggactacaggtgtgcgtcaccatgcccggctaatttttgtatgtctaatggagacagggtttcaccatgttggtcaagttggtctcaaactcctgaactcaggtgatccacccaccttggcctcccaaagtgctgggattacgggcgtgagccaccatgcccggctaaagcaagaaattttcattgcatattttaagcaaaggcaaatgcatatgtggatagactgttttaatttgactaaagtcatattgaatccatgaattttagaagctcaaactattggggaacaataattaccaccttggagtgaaaatacttaatttccacaagatttagtaaaggaagagttttttaaaaaccaccttaatgataatagtatgtacagatgttaagaaatgaaataggaatgtgtaatgttggaaacacaaatatttttgcttctgagaataaaactaattttttctcccaattttctcttcctttttcttttttctgttcccccctttctcttccagaagcccttcagcggccagtagcatctgactttgagcctcagggtctgagtgaagccgctcgttggaactccaaggaaaaccttctcgctggacccagtgaaaatgaccccaaccttttcgttgcactgtatgattttgtggccagtggagataacactctaagcataactaaaggtaaaagggttgtgggcagctagtggtggttgcaggagatagaaatctgggaattgcggtttgacctaccaccctttgctcgttaaaggagcagctttgaaatctggactgcagggatatccaaaacaacaactgcatgtttctaagggagtcgactctccttagaggagttcttgtacaatagccctgggcaaaaacagaacttgccctattttttatactgaaaaggacagctggacaaaatactgaacgcaatttttcccctaagaaaaagcattatttccctaaaatgtcttatattaggaacagagcacttgaataaacataattgatttataaaaactgaggctatacacttacctatctgttcagtacaaacaggaagcttcaaatgtaaacgtgaattctcatacacttataaatgcatatctttatgtggacttgttaaaatgaaattggtatttaggaatttggagatttttagtagttacacaagaatcaatgaaaaagaacgaagctggtttccaaagctgatatgtctgatttggttcctttcttctcaggtgaaaagctccgggtcttaggctataatcacaatggggaatggtgtgaagcccaaaccaaaaatggccaaggctgggtcccaagcaactacatcacgccagtcaacagtctggagaaacactcctggtaccatgggcctgtgtcccgcaatgccgctgagtatctgctgagcagcgggatcaatggcagcttcttggtgcgtgagagtgagagcagtcctggccagaggtccatctcgctgagatacgaagggagggtgtaccattacaggatcaacactgcttctgatggcaaggtaggggacccttggcagggggcgctgatgggcccagggcaggggaaccagaggtcctgctgtcggattgataaattattgcaagaaagctcaaccaagaagatgtttaaagaatctttcaggtgggagtcattccattagccttatgaagaccctttattgaggatccgttctgtgatattacaagttcctgggactggtatgattctcttattgtcttgctagagttttgttgttagcaagttacttaaaataggaggaatatctgttgggttttggacacattttttacaataagattcttcctttaaaaaaaatattttataatgatagaaatcatccccaacgagaaaaattcaaataatagataacctttcttagagcgaaagaccactttactatcccctcccccacagacgcctggcacgtgggcttcttcctgcggatgaacacattcatggagaggtgtgtggacatacgtgcatacacgcatgcagttttcagtgaaaaccgggatcaaacccacagcttaccaaacccaaagtgtggtgttgtaagggaggtggcctatatgattttgtggtcttcatataaataatccttaagagtccataaagagaagggaggagttaacattgactgaggtattgctataatacctgcatctttgcattaaagaaagggaggcataaagagatcttgcccgatgtcaacctagtgagtcactgatggaataggcttggatcccacagtttattctactgcaccaggctgtagttgaggtacagtgttgataggtggtcccgatggtgtatgtttgtttgtttgtttgtttttgagatggagtcttgccctgtcacccaggctggagtacagtggtgcgatcttggctcactgcaacctctgcttcccatgctcaagtgatcctcccaccttagccttccgagtagttgggaccacaggcgcacaccaccatgcccagctgttttttgtttgtttatttgttttgagatggcattttcgctctcattgcccaagctggagtgcaatggtgcgttctcggcttactgcaacctccacctcccgggttcaagcatttctcctgcctcagccttccaggtagctgggattacaggcatgcaccaccacacccagctaattttgtatttttagtagagacagggtttcaccatgttggtcaggctggtctcaaactcctgacctcaggtgatccacctgcctcagcatcccaaagtgctgggattacaggcgtgagccaccacgcctggccgtttttgtatttccagtagagacagggtctcgccatgtcgcccaggctagtctcaaactattgagctcaagcaatctgccctcctcggcctcccaaaatgctgggattacaggcacgagccactgtgcccagcctatattttttaaatagtatgtaatgcatgcatatggttaaaaaaaatcaaaagaacaaaatgaattacagtaaaaagtaatcgtctcctaattcacttttcctgcccagaggcaagcactggtactagttccttctagagttacctggacacagatggatggtatatagatgtttatgtggatgtttatattcaaaaaggcacgcaaatgatacatgcacgcgaatgcatcatgcttctcccgtgtgataatacaccttcgagattgttttatggcaacaggtttagagctgcctcattcttaccagtgactgtgtaccgtggatggactgtcacttatttcagtagtcccctgctggttgacttttaggttgtttccaatctttagttattgtaaataatgctgatatgaggtggctttcaaaccttttcaaaaatctggttctgctgtaagaaaaactcattttacaccaccacccagccctcacaatataacaaaagtttcatgaagtcttacctacccttactgtatgtaacgcactctgatagtttgtatttcattctgttctatttcattttttaaaaattctggttgtaatccactaaatttatttcatagactgactagtggcccatggcctggtttgaaaatgcgttgcacgtgcttctttatgtgggtgtaagtgtgtgcagataagttgccagaactgactgaaggttatgtgcatcaccaggtcaccctctatagaaattgtacaaatttgttctcccacaaacaatccatgaaagggcttgtttccccttaacccacaccaacagtttattattagacatgtaaaaacacctttgtcactctgactggtaaagaatggcatctcattatgttgaatatccatgtggcatattttgggtcatctttatgccatttagtaaattcatctttttcctacatgttagaaatataccaagtgtatatgtgtatctaggcctgttgacctctctgttctcttccattggtctgtctatccgtatgccagtaccaaacttgtaattgctatggcttcataccatgttgtggtatctgataggctagtccccacttacctttttaactttttttttttttggctgtcttcacacattcacttgtaccatatgaacatacatatacttcctttttaatgttcttatttttcttcacatcccaaagtcttctggctgaaatcctattgcccatatctgatgctttccaccactgcagaattctttagtaccaacactgcagtgtgcgtgacggacaaaagagcctgttatccctgtgtgactagacgtgggcctgtcagcttgctttttgggttattgttcttatcccagaggtggagctgcgttcttccattctgagggacgtacttcaggacattgggccctttgaaagagccttcagaccacaagggtacctttctagtgaatcagaacaccagggtgcaccgcccatggggggtgattttctggagcagacagcttgcttcccatgtgtgctatttatccaaggcaagtcatgctgcaccgagatagtcacttgaggtttgcaccgaacaggataatggtttcttttccctagagctgtttaatcagcaaccttggaacagatgcaggcaggcatgatctagtgtgacagctcattagctaggggttgatctaaaatactgttcaaatgggcaaggaaaggcctgcgtatgggatatgtgatttgcagaatttgagattcatccaaagagggagaatctgcctaagatgcctctgtctaaaagctagtatgtgccaggtgggtttgtttcattccaggtagagcacagggagcttatgtgaccaggcagtgtccaccattgggcaacacatcacacttcccttggcgtcttgcctcctccctccccgtctggcacagactctcccatcagccgtttgggcacctggggacttctgagcccacagcgtcatccagcagaccgtctgcggaggttccttcctgtgagggccgcactcgagggggtgtattgggtgggatcgtatcactggaatgagtgaacatcgttagagggagctcccacagctatgcgtgtgaccgtgtggctcgccgctgaaaaatgctgctcacatagcagaacttcgatgcaatcctttttggatttctaaggggaaattttaagaccgataggaggaataggctggggttgaataagtttggttcttatttttaaattagctcatctttagaaaacaactgaatttagaagattcttctgtaaggccccaaaggatttctttctgcctccccgctcttggctcttatttgtgtctctcctcgtgttctgagcttttcagcagcccttgtgggtcatcagccgaggaccatcagctcggggcccagagctggggactgggagttatgagctggactcttgaaggggccaatactaaaccgagccgttgccatttcctaggagccttgacaggctcaaacatctctgggtacccggggatttgactgtcattgttctgatcctttcccaaagttgtaaccctctgttgacatagcggaattgaagattgatttttcttcaccaccttctgcctaaagttcttagttctgaatgtgtccacacctcattgacttctatgagatgcccctgtcacgttcctcgattccttctagtccttaatagagtctttccttttcttgaaagaaatttgcccagttgacatttattttcatcgtctgctgaagtgacagatccaaggccctaagcttcagcagagttgcaggaagggaccatttacacagcctcttagatgtttaaggtttacccgccctgacagtggctcagcaggcgtaggcctcctggtgaaaagccgagcacatggctaacctgctctggtggaggggctttggaccgttcttgtgtactgcgaggcttgccttcctgctggtgtgtgagcagctctcgggggaacttgcttcctggctgagcaacctgtaaacagtatgtctgaggtgggactcccgggcccaaagcagccaaaggttgcacaagtctaagctccgttaggcctgtcagtgtggctgtcaaaagaaacgctgtttcttttctttctttcctttttttttttttttttttttttttttttgagacaggctgtcacccaggctggagtacagtggcacaatctcggctcattgcaacctgcgcctcccaggttcgagcgattctcctgcatcagcctctcaagtagctgagactacaggtgcccaccagcatgcccggctaatttttgtatttttagtagagatggggtttcaccatgttggccaggctggtttcgaacgcctgacctcgtgatctgccctccttggcctcccaaagtgctgggattacaggcgtgagccactgctcctggcaaaatgctgtttctaagcgtttctttgacaagtcccatccttcaggttcatgcatgattagggagaggcagcagccctgactgagcacctgagtgttcatggaaccaggtgcatagcgtaatgacatgccattcatgacactactttcttccctgaacatgccatgaattcctgatgattacacagttccccaacaagtgctgctcaaaacctggaactaatcagaaggaagcaccagccttgactgttagtgggacacggggaagatggctgtgaaccaaatatgcggtgcctttgggggagaatggttttagtatttagtaagtgtcagtatgtaagttttatgttgaaaaatgaactaagtcacaacaaggtctataaatttaattattgaaaaggataaagttgggccattcagtgaaacctcctgtaactgaagtctctaacacagtagccaatgggggaatcaaatgagcccaagaagaaattctgcgtaaactaggacttaggggagcccttagcattccactttggagtgaaggaacccgatccgccagttggggaacgctcctttgaggcccatgtgcttcctgctccgacgggagagagggataatgagacttgctcccaggtgccctgccctggagcccagcaggccacacgggctctttgactctgtactgtgccagtgatttccaagatgggagtggtgctctgattgcaggaatgtcttcttggaatggcttttctcacttctctagagtccttggtagggagcacatcatcagctgagctaacgtgagaacaggggttggagcacttgccaccggcagtgaagtaatcggacagctgacagtcttttccagagggtcggggattgggagctgaccccaggtcccgctccgttttctttgtgtgcagcacttgtgttggtgaccagcagtgaagagagtgcgtggacgtcaccgtgtggttatgaagctaacggcagccctcagcggtgccgacttccgctccccgacacattcctgtgtgcacgttcgtgggtctgagcgtgactcatggtgtgtgtccctagagcagttcactcagaggcttctcttccgtgctctcaagaataaaagcagggccgccacatcctgataagtcttgccattcagcggtcctgtcttgcagagggataagccagtgtccccaggccacagtccttacaccttgagcaagttccccagagtgaagcaatctttctagacaagttttgcgtttctcagaattttattttagtgatattgttaccaaaagattgtaaccccaaaatgtgtgcctttggcttgcctgttttaggaattcacttgtgttatctccccaagcaaaacaaaagaaagagaaaccttcctgttgacgaatcctttttaccttcttgagagttgtcaatgggactaacttgtatatttctttgctaccttcttttaaaaacatttttcttatttactattacagacgtatagtaatggtgcctgacataacccacagccaaaggccttggccttgctgtgtgtatttcaggctttttcttcccttttctttttttttaagtaataagatattacagttatagctgaagcctgatcctgttcccttttctccctctcgtcccaagcatcaccactgtcccaaatctgctccttcttcccacatctttgcagtttgggcaagtcttctgaatgcctagtcatgattttaagtcttctttccaccttcagtgatggttggctaccctgagcaagccagtagattcagttatgtgcctggagtccagatgttttatgtggatttttcatgtggaattgtttttggtaaggaagtattcccttgccacaccaatgaaaagagaagaaaacaggtagctggcacccactgcattgttgctttctgccagcctgctccttctccttcctctccagctctgttgtgtccagatgcaaactctacatgcagggtttgaccctaggtcctcacctgctgtagctctcacacggggaccgaatgctcttgtgtcgtaaatccttccttttgcttcctcgtgttggatgtgtttagtggttttcatcttctggtcactatttcattctaggtttatcccctttaaattataaattaaatgaattcttcgcttttcctaccagcaactacccaccaagttctaccatgtgttaatttaatcaacagttatttattgagtacttattacatgttgatttcctgttctcaacattggaatgaagacagcttagggttctgctttcatgaagcttgcatgctcttaggtggagacagacagtaattaagcagataaacaggaaattatgagctagtagtgggtccattgctgagaagtaagacaggtggtaggatgacccgtgccgtgtgatgactttagattgggtggttggggaagacttcacggaccttaaaactggccttggaacgggaagcgagaactgggcacggaagatgagggagtgggagatttcaggcagagggagcagcagcaggtacagaggccctgaggccttttattgtgtctttttgcttgagcgagtaacttagagcacacgtagagaaagacagcagaagtgatcttctaaacactctgtcctgtgtggagagctccttatgtgagattttgctgtgtagtgaattaaggctcagccaaactggctcacgtgagctctttgagcttgcctgtctctgtgggctgaaggctgttccctgtttccttcagctctacgtctcctccgagagccgcttcaacaccctggccgagttggttcatcatcattcaacggtggccgacgggctcatcaccacgctccattatccagccccaaagcgcaacaagcccactgtctatggtgtgtcccccaactacgacaagtgggagatggaacgcacggacatcaccatgaagcacaagctgggcgggggccagtacggggaggtgtacgagggcgtgtggaagaaatacagcctgacggtggccgtgaagaccttgaaggtaggctgggactgccgggggtgcccagggtacgtggggcaaggcgtctgctggcattaggcgatgcatctgcctggaagtctacctcctgcctgctgtccgagggcttcattggcgccacggaattgacttttccgtcttatatcattcctgtgtctttgtaggagtggaatcattctcatagtccgagtgtgtttccacatatggtgagagctgacaagcatggaggggttttggtgtaaaaagattagtcatttggagaggttttctcattttatggcaaggttcttttaaagccgtggatttccatgctgttcgtgcggcatggagatcacttcctaccgagagttaaggaggaaaaaaagatctctgagttttgaaagaagatttaaccaaaatgcatttgactcttctgtggatttttgttggctgatttggaaggcaggtgccctgggcatccccagtgggttccaattctgcagctgcccagactcctgcaggcagaggtggaagtgtccccgctagaaaggcatccaggaaactcgcttttgaccaactcagatacagtctggtctttcttgttaactgggactttaccctctccactaatgaatagtgtttgtagtttccaggcaggtttttttcttcttttgaagttctttgaaacccttaggacgccaagggaaggaagttttcattttcagccctttgcattcttcaaaatgtgatccaggcttttccctgtggcgagggtgtcccctagtgttgacttacattatttccacttgttttaaatgaactttgattaccttgacctgtgcacagaaatcaagagaggcagcccctttttagagctgttagaaaagaactgaaacatccacctctgggaaaaatagagtttagtttgtgcatgtgtctcagaagtcaggtgcacacattgagactggtgcagccacatgcctgccttttagggactccttgactgacctgatgccttcacccaaaggcatagtgaaatgggaagtatgatttctgactggtatgaagtggctgctttagagaaaagatcacattctttagtcctagaaaccaaaggtggcttcctgatgctcttattcagcacgtgcctgtctttgaggcaggactggcactggggtgggggcatggtttggggttaccttaaggaccctggatatttctcagataggactttttcttttctttttttgagacggagtcttactctgttgcctaggctggagtgcagtggcatgatctcagctcactgcaacctccgcctccccaaattggcgattctccttcctcagcctcacgagtagctgggattacaggcacccgccaccacacccagctaatttttgtatttttagtagagatggggtttcgctgtgttggcctggctggtctcaaactcctgacctcaagtgatctgcctacctcagcctcccagagtgctgggattataggcatgagccaccacacccggccctggactttttcttaattgaataaatatttatcaagttcttcacttctatttgacggttcctgggctcaacactggattagaaaatgaatgggacagagttcttcatctgagacatagggtggtccaggtagtaggaggaagaaggattgcagcgcagcagtcctcgggacaccaccagggggtgaacgaaggagggacgggggagctgtgcaggtgccccagctccttgggttgcacagggttgaagaccagacccaagaaatggggccttgaccagctcagcaaactgagaatggcctagatttcagcacactttcaccaggatttgtcaaatgaaggaagattccaagcgcaaaataccctagatttcaaccagtaaaagcttgtctgaaaacttccaagatcgggttgtacaacttgacatttgaggaaacgctacttcagtagatggtgctgtggcattgttttctgaacaactgaaggaggagactccagagaagggtacctgctggagacctgtgtggtttgtggggtgggtttcttatatcactgaatctaaagtgggtgcctttcagaatgtgctttactaataatgtgttactctgcttttaattatacttctaataatttttcccaagagcctaattaacttacgatctcacagttggtaaagaattacaggatgtcattgcgtggatttctgtgggcagtcacccggagtggtatctaattagggaaaaggcagtatgtccctttctggaagtgtgttaactgaaaatacggtactaagcaactgctaaataaattagccctccttcctcctggccgtgcgcagaaacatccctgcagtatgttgcctatttgtcaaataagattagtgtaaatatggggcatttacctttgctatagaagctgaaattgccaggcacggtggcttacgcctgtaatcccagcactttggaaggccaaggctggtggattgcttgagcccaggagttaaagaccagcctgggcaacatggcaaaactctgcctctacaaaaaataccaaaaatcagccaggcgtggtggtgcgtgtgtattcctagctacttgggaggctgacatgggaggattacctgagcccgggaggttgaggctgcagtgagccgtaatcgtgccactgcactcctacctggggagcagagtgagaccctgtctccaaaaaaaaaaaaaaaaaaaaaagctgaaatccttgagtggattctaaatcatggcagtggctaacattcagcttcatcgtgcccttgctgtgtgcctggcagagacctctgtgcttactacatgtcgcatctcattgaatcctcacaaccttaagatccttccaggttgagcatcccggaccctaaaatcccaaatcctaaatgctcccaaatccaaaactttttgagcaccggcatgcagctcagaggaaatgcatactggaacatttcagattttggattttctaatttggagtgctcatctggtaatatagtgtggatattccccaatctgcaaagatctgagctccgaaacacttgtagccccaagcctttcagttaagggacattcaccctgtatcaacattttaatgctgagaaaatggaagagagagaggttaagtgactgacctggcatcacacagccaggagtggcagcatcaggatttgaactggggcactcagctccaaagctcagctcttcttttttaaaattgaacccagattcttatttctcaaataccataaaatatttacataagccacagttatgccttttaaaaaaaaatcaccttttccccccactctcccatttacttcctttgcagtttgtggctacgatctaccttcctcttcaaaacccttgaaaaatccttgcagccttgcccaagcgtccttccctcagccgatttttgggcctcagtttcctcccatccagcctgtttcctatcgctggcttctccaagggcagagccagagtcctcttttgccagcagggggagcaagggcctacttttaaccgcaactccatagtgaacaagtcaagcaaccttgggtcattcatataccttccaggcagaaggaagacagaagagaacaggaaaaaagcaggacactaggctgacccctgcagatgggaagctggaattacagcaaaggctcattgattgggaactgcacccttgaattttgatagtattgggcaggacatagtcttgctatctgtgttaaagggaggacgtgcttaagaaaaccaacagtcaagtacaagaagctctaattttttttgaggtgggggaacggggtctcactgtgttgcccagctggcctcaaactcctggctcaagcagtcctcccacctcagcctcctgagtagcagggatcacaggcttgtgccactgtgcccagctaagaggctgcaattttttaatgaactgtattcagagtttgtacatcagtgtcttttttttctatgaatcagttctctaagtaatagaatttggaaaagaccgctggtgatctagctgtggcatttagattgactcatgagctaactgacaaatttactacttaaacagtggaaaataatgtgcaggatatatttttttgaataggttgtcccaccctcgagttctgtgtctttcctgagtccgcatatgtgaaccttgttttaaccaggtgacagcatcccataggcacggatctctgtcttctgttgtccacatcatgtgtcttggcagttgttccttattgatatacataaggttgtcttgtttttgtatggatatattttaacatgtaccagtgttcagtgggcctttctcttatttccaatattttgctgttctaaacagcagcacagtgattcccctcatttgcatgtatgtgaaactatcctggtgggtccgcttccagaaactactggatcagggaccatgtgcatttatggccttgaccatactgccagagtaccttccaaggagtttgtgtcatcaatttgcactccccagtggtgttgagagagtgcctgtttcctccacccagcacagtgtgtttcggttttatttctcccaggaaatgggtgttagttggggagctccagaaagaagccgagaagaagggcagtcgtacccttggcagttgtacgcagtggctctctggccgcacaaggagggctcggagcctgctgttgccaggttgcacttgctcttgcaagacaggcattccttgcagtgggttctcctctggccagggagatgagttctgggggctcctctacgaggtggtctctcctgggctttcctctcgagcttcaagtcccacctctggagtgtgaatcgccttcctcagtctaactctatccctccagtggtttttttttttttgctttttgtttttgtttttgtttttttgagacagagtctcactctgtcacccaggctggagtacagtggcgtgatctcggctcaccgcaagctccacctcccgggttcaagcaattctcctgcctcagcctcccgagtagctgggactacaggtgcctgcgaccacgccggctaattttttgtatttttagtagagacagggtttcaccatgttagccaggatggtctcgatctcctgacttcatgatctgccctcctcggcctcccaaagtgctgggattacaggcgtgagccaccacacccagcagtctcttcagtgtatttagctgtgttgatcctgattcatctgatgggtgaaggaatattggaaataaggataatccctgtggtgtttcactgtgcctgtaacctctctcacctagcatttggttaaccagaaacagatgtggaaactgatctatctgtagataatggccctgctcagggagggggtccctgctgagagcgagacattgaaagcctgctacacagaaactgctggaaggccaagccatttcttttttctttttctttttttttttttttttttttcagacagagttttgcccagtagttcaggctggagtgcagtggcatgatctcagttcactgcaacggcctcccaggttcaagcaattcttctgcctcagcctcctgagtagctggcattacagactcctgccaccacgcccggctaatttttgcatttttagtagagacacggtttcaccatgtggccaggctggtctcgaactcctggcctcaagttatctgcctgtctcggccccccagagaggccaagccatttttaaaaacagtgttctttttcatgctgtagaatacctgtgcttgggggtgagcaaaaaggaggaaactgattagaaaatacctatgagggccgggtgcagtggttcatgcctgtaatcccagcactctgggaggccgaggagggcagatcacaaggtcaggagatcaagaccatcctggttgacatggtgaaaccccgtctctactaataatacagaaaattagctgggcgtggtggcaggtgcctgtagtcccagctactcgggaggctgaggcaggagaatggtgtgaacctgggaggcggagcttgcagtgagccgagatcgcgccactgcactctagcctgggcgacagagcaagactccgtctcaaaaaaaaaaagaaaatacctgtgagatgttgagtctgggagaatgtatctgtgagaagacaaacaaccctagtattcattaaagaaccagcctttgttttctacaagctatctgttcggtctactcaggaatagagataaactgccttaatagtaataaaagcaagcaccgctgagtgagtgctggcctcatgccaggaactgctcttggcactctgtgcacaagggagatactgacattctttctgttgtgcagatgagaaaacaggctcagagaaggtgagtaacttaccatggtcacacagcagcagagctaggtcagtataatccacaagtcattctcttaaccgctccgccgtaccgcccagaatgttcatctgcatctgggccagcctcgtcagtccgtgcaaagaggccagttgacccatctccctccctaacaagcacagaagagaccaggctgaaaattcatagctttcactcaaagtgtttccttcacctcattcatctgagttagctttattttactatataaagagaattttcttcagcaaaatgataggaatttttttaatgaaagtaaaggaatgtcacagaattgcgtcagggatatttccagtttaacacaactacaaacgtaggctgttttgttgttgttgttttggttttctattttgagatgaagtctcactctgtcgcccaggctgaagtgcagtggtgcgatcttggctcactgcaacctcctgctcccgaattcaagtgattctcctgcctcagcctcctgagtagctggaactacaggcatgcgctaccacgcctggctaatttttgtatttttagtagagatggggtttcaccatgttgaccaggttgttccggaactcaggtgatccaccttggcctcccaaagtgttgggattacaggcatgagccaccacactcggccagctgttgttaatagttaaaattataaattggacaaggtctgattccagcagggggagacaaattcacattgatttttctataagaaaaggaattatttgtactttcctcccttgtgtgtttgtgtgtatgtaagagagacagatgagaagagggctgcctttgagagccatgttccttttgcatgtacatacctctcaagattattacatgggtcttttagaagagggtcagtagctataaaagcaaatgatatttatgaaatgatttcattgtatgtggtttattatgtagtcttcaaaacagaaaaaccccacttgcttcgaaagcttcctttgagagctactttttaaccatattgttgatcaagcaagattcttaaagccccagtcctatacgtgagcagcattgaatccccggatactggcaggcgttcactgtccagcctttgacattagcatgtcaccctggtaaatcagagcactccatgccaaaaaacagcatggtctgctgagcacattaaggagcagagagggctcagaagaattaaacggccaatggggtggtgacagaggtgagctctttccccctcggacagcttggcatggtgactaccaatgaggtttaattgacattaagagcagctcaccatttttaaagagcgataaattgtttccaagtttcagcctcacggagccctgagctaagagataatgggctgacacatagcctcattggtcacgcttcacttgtaaacaggattggccaaagcaagaaggctgtaagtaaaggttggcccgtcctctggaagcctcccccacagcagggtggggaactggggcagccatagcaagcaggaccatcaggacacggtgtctcccaaacgggccggaacatacaaggttctacgtttaatagaaagttgatcaagccttcctctttggggagcctaatttttaagccattcactctctgttcccctgcagtcttttctctccaaactctgttgaaacttggaggcatctcgcttcctcctttggcctttgtagccaggttttcgcagcaaacagaccatatcatttaacacccacctgcttcttgttctgatagtcagttcagtagacagtagcattttttaagtcaaaaagaggcttagtgatgtaggccaaggtcaaggctctgtgtcatggggctctccccagggctcagtgccacggcacttcagacttgaccccagactgaaaagatgagaggacctgtagaagtcacggcctgtctgtcccgggcccatgctcctatctttttctcccccttggcatttagataccatggacttgttaaaatgtgacatgtactgatgatccttatgaatttgttggtaggggagctgctggtgaggattattttagactgtgagtaattgacctgacagacagtgatgactgcttcattaagagcccacgaccacgtgccagaatagttcagcatcctctgttgctactgtactttgagacatcgttcttctttgtgatgcaatacctctttcttgtcatgagggtctcttcccttaaatcaggtacatttcagattcttcaggtgatgttttttaggctgagtgtgttagcaccccttggaaaccaggttccctggggaaagtgtgtcacgtttgtggtgtttgcccgtatagctctcccacacccccacgagctccaagaggtggggaagcacatgtggcctgcctagcaggcaccagaagcaggttgtcggcacatgcaagccagctttgccctgttgcctgggggagaattgaaaagtttggccccaaaggggaaaattctttctgccatcaagttgctggtcagctgtcatggaacctgtctgcagcaatgtggctgtcacaaaacgcagcccaggacgagtatgcgctgaagctccattttgcattaactagtcaagtacttacccactgaaaagcacttcctgaaataatttcaccttcgtttttttccttctgcaggaggacaccatggaggtggaagagttcttgaaagaagctgcagtcatgaaagagatcaaacaccctaacctggtgcagctccttggtgagtaagcccggggctctgaagagagggtctcgcgccgcacccccagggtgacacaggcgctggggaagacgcacgggcggctcactgcacaaaacctcgttggaatatttgtgctctgccgacgttcagccgcgggtaaaatgaggcctgtatgggatgggtgtgtgcgtgtgtgcacatatgcacatgtatgtatgagagggagaatgtgattattttaagtggatacctaaaagcagtcaaatgcaaatctgaaattagtttctgaaacttgggcattttccagagttttctcactgaagtgattctgtaagtagacacataaccatcagacctaaccattcaggggtaaactgacggtggtgaaggtcatttgaggtggggccaggtctgcgtctgaattctgtggcagcctctccctgcgtaaattcaagttcactggcttgagaagaagaaaagagcctggccatgtccctcccacacgagcacagtctcaggatgcaggtgcttgggaccatgttggaagttgggcccaggactgaggagcagagtcagaatccttcagaaggctttttctttagacagttgtttgttcagttgggagcggagccacgtgttgaagtcctcgttgtcttgttggcaggggtctgcacccgggagcccccgttctatatcatcactgagttcatgacctacgggaacctcctggactacctgagggagtgcaaccggcaggaggtgaacgccgtggtgctgctgtacatggccactcagatctcgtcagccatggagtacctggagaagaaaaacttcatccacaggtaggggcctggccaggcagcctgcgccatggagtcacagggcgtggagccgggcagccttttacaaaaagccccagcctaggaggtctcagggcgcagcttctaacctcagtgctggcaacacattggaccttggaacaaaggcaaacactaggctcctggcaaagccagctttgggcatgcatccagggctaaattcagccaggcctagactctggaccagtggagcagctaatccccggagtaaggaatatttcatttttgaaccattttgggctaagtggaatattaaatgaagttcataaaaggcgtccttcctaataatcacagtcccctctgaaagagagtactcattgttcctccggggccagcgcccagcagtaatggcctcttcctgggagccgctggcattgcttttacgcaaactcatgggaacaaccagtacatggcttttgttttttagtgtgtgtgtctttttttcctgctttctctttattatcttttcattctccacttaacttgctgtcctctgattcagggatgtttccacaattgtcagaattgtgtatgtggaggtctaaattaagtgtctttgctgttttaaaccctgaagtgttttgaccttcaaatgtgccacaattatcttggtcttcaaattctttgctggtggaaatggcttcccagcaaagcgacggcctgtgcaggacagagcctgatgggctttgctggcgtcttttatacgagatgttctccacaccaccactgtgacctttcctacccaattagctcaagtatgaaacctctacatgagatttcatagcaaggaataagggtagcatgtgtgaaatgctggcggctccttgtaagacagattttctatgctccatgagagcctgatccagatactcctggctttcaggaaagtgaatcctctgatgctgcaaattgagattgcttgacttctggtttgcctggcacggccgggtccgttccttcttcattcaagcgaacttaaaatgctttatcaaaatcctcttaggcacaactcttctgtatttaatttcactcttgttgctgacgatcaggctatctcacgcagccatcacctcaagctgctgccccctctcattccgctcttcccgtttgccttgtgatttcatggttaatgttcatgaaccaaagattagactcctacctccctgggagaatcaggaagtgagaggaagcagattatacaggagagagttttttaggatacatttgggtacacctcaggaagaaagagggaagtaggaaacacagtttgggtaaagaatgccatgggctttgttttattttgtcccatcaagtctgaataggacaagtggagatgcactctgatagaagtttcttgcaatcaaggactgggctcagtgtttgtctccgtgcctggcatagagtagcaataactgcacttactattctcgacacttcaatcaaagcacttagcatattaattaattacactcacagcaaccctaagaggtaggtgccattattatcgtcttcattttacggatgaggtaactgagtcccagggtaattaacttgctccaggtcatgaggccagggagcccgctcccagcaccagcctctccccatgttgggatctcagggtgtgtttgctgagaggctggcactgtgttaattgccgtgggcattaatacaaacttccagggcattggactcaatctttccattgtcagcattgcacctttgctcagcagtggtggatttgtgaagtggaaggttggccaggagctctcatgggtgaacattttcctttcttagagatcttgctgcccgaaactgcctggtaggggagaaccacttggtgaaggtagctgattttggcctgagcaggttgatgacaggggacacctacacagcccatgctggagccaagttccccatcaaatggactgcacccgagagcctggcctacaacaagttctccatcaagtccgacgtctggggtaagggctgctgctgcactgaagtggtccttcctgactacaggagggtttttttctgcctctttcttgctcttccctttcttttcttcctttctttttgtttttttgagacggagtctcactctgtcacccaggctggagtgcagtggtgcaatcttggctcattgcagcctctccctcccgggttcaagcgattctcctgtctcagcatcttgagtagctgggattataggcacccgccaccacacccagctaatttttggtatttttagtagagatggggtttcaccatgttggccaggctggtctagaactcctgacctcaggtgatctgcctgccttggcctcccaaagtgctgggattacaggtgtgagccactgtgcacagccacccttttttttttttttttaactgtgtatttggcctgaggtccaaatatggtgcacagtgtatctgctgatctgttaagtctcctctataagccccctctccatgtctttatttcccttgctgtttattgaagaaaccatccttagagtttcgtacgttctgggttttgctcattgtctcccatggtgtgatttaatatgttcctctgacttcagtattcctagtaatgggtggctggatctggaacggcctcatcacattcaggtttgactgtttctcttttagtaagagtggatcaggggagatggtgtgcccttccatcagtagatacaaaatgcttcatttatttccttccttcctttcctcccctctccctcccctcctctcttctccttctccttccgacggagtttcgctcttgttgcccaggctggagtgcagtggcacgatcttggctcactgcaacctctgccttctggtttcaagcgattctcctgcctcagcctcctgagtagctgggattataggcgcatgccaccacccccggctaatttttgtatttttagtagagacggggttttaccatgttggccaggatggtctccaactcctgacttcgtgatccacccacctcggcctcccaaagtgctgggattacaggcgtgagccaccacgcctggccccaaaatgcttgatttgctatcgtttttttgtgggggtttttttttgagtaatttttggcagttactgatatacagtgcctagatccaatagtttgctaggtattgccaggtaggaattctctaattctgtcattcctgttaagttactagtggaaacttgtatgaggagaaacagttcctcatctgtgtggttactcagtggtacagttcatgtaggaagagcagggtcaattcttgcttctttgtttttatttaccagtttttaaaataacaaattactttttcttttttttttttggagccagagtcttgctttttctggggtacaaagtacaggctggagttcagtagcatgatctcggctcactgcaacctccgcctaccagattcaagcaattcttctgcctcagcctcccaagtagctgggattacaggtgcctgccaccacgcctggctaaatttttttgtatttttagtaaagatggggtttcaccatgttgcccaggctggccttgaacttctgagctcaggcagtccacctgccttggcctcccaaagtgctgggattacaggcgtgagccaccatgccctgccacaagttggtttctttttttttttttttttttttttgagacagtctcactctgtcgcccaggctggagtgcagtggcatgatctcagctcactgcaagctccgccttccgggttcacgtcattctcctgcctcagcctcccgagtagctgagactataggcgcccgccgccacactcggccaattttttttctatttttgtagagacggggtttcactgcgttagccaggatggtctcgatctccggacttcgtgatccgcccaccttggcctcccaaagtgcacaagttagtttcttaatacccttcagtggtggccaattaggtttttgctgtcattggtggtattatgaactctcagatttatatatatctgatgtgtttcagtccactgcggttattttccctgttgatattcagattgtctcgtctttggccagtgggaacttcacattagctcctagtcattttgacattaactttgtagttttccatgacgtccgcgccctcaaatgacaagctattgcaggttcattctgtgccccaggcctgaatcacccatttctctaaggaatcttatcctttaatgggaaatggaattttaaggcaataatctcagatttcaaaactttcaaagatttcataagatttttatgaaatgtttagagttagaaggggctttggagatagtcttgtgcacccagaaagcagtggtggccggttaggcacagagctggttggtcacagagctaagagttaacatggccagctgacttccggcgccaggttccttctaccacatatcccagcaagatggtcacattacctaaaagaccccacagggtctgaaactcatcatctgccctcctctagcatgtttgtggggtaagtttactgagtcttgttctgtcctggtctcctttttttttttttatttttgagacggggtcttgctctgtcgcccaggctggcgtgcagtggagcaatatcagctcactacaacctccgtctcctgggttcaagcaattctcctgcctcagcctccaaagtagccaggactactggcgtacaccaccacacctggctaaattttttttttttttttgagatggagtctcgctctgtcacccagcctggagtgcagtggcgcgatcttgatcttggctcactgcaagctccacctcctgggttcacaccattctcctgcctcagcctcccgagtagctgggactataggcatctaccaccacgcccggctaatttttttgtatttttagtagagacagggtttcaccatgttagccaggatggtctcaatctcctgacctcgtgatccgcccgcctcggcctcccaaagtgctgggattacaggtgtgagccaccgtgcccggcccctaatttttgtatttttagtagagatggggtttcgccatgttggccagggtggtcttgaattcctgacctcaaataatcctcccacttcagcctcccaaagtgctgggattacaggcgtgagccaccgcacccagccttgtcctggtcttctgatgataaagagcctggtaaaatgtcagagcctgggctgctgctggggccatcccttctgaggtctgctgcaaaggtaactgattttaaatgtagtgtagtgaaatgctacacatcttgaacagcctttctctttcggttttctttcagcatttggagtattgctttgggaaattgctacctatggcatgtccccttacccgggaattgacctgtcccaggtgtatgagctgctagagaaggactaccgcatggagcgcccagaaggctgcccagagaaggtctatgaactcatgcgagcatgtaagccttcctcagcctgttctcacgagtatatgtgggcattccaggaaattcaactgtgcaggagtgtgtacacaaagttgaaagtttttccatgagctctctccattccagttcttcagatgcagctaatgtagccatttgctacctattgacctttatttacagataaatagtatgtgcgtgacttgtcttttaaagcaaaaatggtattgatagataccaaacctgggtgtattcctaaatacagattcctgggccctgctttcacagacattctgctatagtagctaagctcatgaggtgattttttttttttttttttttgagacggagtttcgctcttgtcgcccaggctggagtacaatggcgcaatgttggctcacttcaacctccacctccctggttcaagcgattctcctgcctcagcctcccaagtagctgggattacaggcatgcaccaccacgcccggctaattttgtatttttagtagagatggggtttctccatgttagtcaggctggtctccaactcccaacctcaggtgatctgcctgcctcggcctcccaaagtgctgcgattacaggcgtgagccaccacgcccagctgcgaggtgatttttatctggtcgttttatactgattacatatgtgttatctgtactatgcacacacaggatgttttcatatatcttataaggtatttatatggccatttcttacactgttttcccacacatgtctttccacgtccatatattcagatctctccctctccctacctcttatttatgtatagctgcccagtactccatttcactcattcatccggtcctcttttgatgtgcatttggttgttttacacatttgtttggtttttgcccttataaacaaagcagaaacaaatattcatgtacacgaatctctgggcactttggctggtatttctaaaagttgaactgttggttccaagaactgtgtgggttttaaattttgatacattttaccaaactgttaaaaaaggttgtgccattgtatgctccagtcagacgcatatgggagtgactgttcctggtccccagtactaggctttgtcagtctgtttagtcctcatgttagtctcattttcatgagaatttctttacttcagactttgataaccgtgaagaaagaacaagatagaaggtgagctgtttggcttagtaattttctacacctactagagcgggactgggaaaaatatatttgtaaatgcagttcttgctgtcactgtctctctggggttttacaatccatattcctgccagcatctaacgtcttttcaaattcttaatgtctataacaggacatgatgacattcatcgttttgacttgttgcagcaaaagatggttagcaggattggaatgttgctttcattctagacttttccttgagaactgctagccccgtattgctagccagatctcatggatgatctgacttgggtttcatctgtccaggttggcagtggaatccctctgaccggccctcctttgctgaaatccaccaagcctttgaaacaatgttccaggaatccagtatctcagacggtaaagtacccatcccggggtacctgcagtggggtgaaagggcagccatgtgggactgcagcctgggtcattcggttcacttcctggtgaaagttcacagaccagcctgtcctgagaccagaaagctgggcagaggtgtggagtattgtgctttcttgtctgctgcagccctgcagagttctaagaaatgctaagggctgtttctccggtatccacgtgccttttctttagttgtatgcagatgagcactgttaccttacaaagaaagagaaccaccacaccaagccaacaccagtactgatggctgctggatttttgtttctgtccctgtatgattcttagaagtggaaaaggagctggggaaacaaggcgtccgtggggctgtgagtaccttgctgcaggccccagagctgcccaccaagacgaggacctccaggagagctgcagagcacagagacaccactgacgtgcctgagatgcctcactccaagggccagggagagagcggtaagtcccccgcttcccccaaccccactgctcttcccttccctgccagaggctacattcaggccatcataggccaacgggaagctgtgaatggagcccgcacagaagggcagccatggcctttgtcaatggttcagcttcggaaggaggaaggttctcctctccccacctgcctcctatcccctccctctgagagtccccgaggagcataggctccagcagtgagttcagtcctgtaggcagaggtgcttctgaagcccgccaaggagctagcccatctcccacctattacccgcggcatctgtggttgctgtctcagagcagattcaacaatagtaagcaccaggctgcgtgacaagcagctcacggtgaaggcactgatgtgagaagctcgctgcagccaggtggaaccaggacacgcacatggacagaacccgtgtcctggtggtctctgggaagagcatctttctggtgccattgcctaggcgagcaagggagttgggatcagctcaggagggggtctcaagacactagcaaaaataataatggccaacatttatgtagtgtgcctactacaggccaggctctgttctatgttcatggttgacccccagaaccagcagtccaggttctgctgcagaccagctgaacaaaagcattgaggggtgtattagtctgttttcatgctgctaataaaggtatacccaagactgggtaatttataaaggaaagaggtttcactgactcacagttccacatggctggggaggcctcacaatcatggctgaaggtgaatgaggagcaaggtcacatcttacttggcggcaggcaagagagcttgtgcaggggaagtccgctttataaaaccatcagatctcgtgagacttattcactaccacgagaatgtgggagaaacctccccatgattcattgatctccacctgaccccaccgttgacacgtggggcttattacaattcaaggtgagatttgggtggggactcagccaacccatattggaggtggggggtaggccaagcatctgggttcacagaggatcctggggatggcaatggtggactccattctaatggactgcagactgggtacatgtgaagggactggacaaagccctacttcttgaagatttatggtgggatgtttactgacagcagaatctataaacctgagttttatcacgtactctcattagtaaaaaaaaaacaaaaaaaaacagaacatgcagcccatatatatggtatataaagtacgtatgtccactactgtaggagtagagtgcgtatgttatgtaccaaaacgcacatttaaaaggcttgcatgctaaataagtccaaatttgcaatacttcccgccccgctgggccatctcactcacctacttggaggttatggcgtatagactctccagaatcttccacccttcctcctcttatcggttttcctgatttcaggtggctgagcagtagggaggagaggcctctgggaacgctgtgcttattaagaacccagtgatcagcagtcatgttcatttacgcccgtcagtttcatctgaggggtattttgatagtgatctcttggtgagccgagggtgtcaattaactgctcagtgctgaaactgagtggtgcataattcattgcaatttcactctcctggcctccttccactagattaaagttttgggagggctttggtgttccctgattcagatgtcccgcgtgctgccttgggttctgataaatgcatactggtacctctgttgagttacaggtgccaacagaaaacctcttcttgcaagctgacctctgagggagaattctgttactcactagcaggagcttggcaacaccaaaaagatttccttttttttttgagatggagtctcactctgttgccaggctggagtgcaatggcatgataccagctcactgcaacctccacctcctgggttcaagcgattctcctgcctcatcctcctgagtagctgggactacaggcgtgtgccaccacacccagctaatttttgcattttttagtagagacggggtttcatcatgttggccaggatggtctctatctcttgacctcatgatccgcccacctcagcctcccaaagtgctgggatgacaggcttgagccaccgcgcctggctaccagaaagatttcttatgagctatgattcatatttaaagagtgcccattaaaaaactgttggccgggcgtggtggctcacacctgtaatcccagcactttaggaggccgaggtcagcgaatcacaaggtcaggctcccgtggcacaagctgggggctgcccccaccccatgctccccagaggagcacccaagcgtctgggctcagacaggcctggatctgataaccggctctgatgccaccatccctgaggccaggcaagtcccagccgggctacagcactgttgtgagaatgcagatgaggttgtaaaggtgaagcacgtgtcacgcttctctcaataaagccatcattgctgttaggattgtcattaggaaaggctttgggccgggtgcagtggctcatgcctgtaatcccagcactttgggaggccaaggcgggtggatcacctgaggtcaggagtttgagaccagcctaaccaacatggtgaaaccccgtctctactaaaaatacaaaattagccaggcgtggtagcgggtgcctatagtcctagctacttgggaggctgaggcaagagaaccatttgaacctgggaggcggaggttgcagtgagctgagatcgtgccactgcactccagcgtaggcaacaagcgagactccaactcaaaaaaaaaaaaaaaccacacacacgctttggtctctttccctgaagatgggaacaaaaagctggacggccctggcctcttcatccctgcactggtttacttgaaggcagcagccccccacccacccacatcactctctagtgagtataaaaacgatgacaaggccaagcaaagggtcaaaacctgtggctctcctgccagccagctagccgagaggcctatgaggagctctgggaataaggggctgtgtcccacagtggggaagggacaatgggccattatgcacaggagataagaagggatgacctttgacaatttttttgtttgtttgtttgtttgttttgagatggagtctcactctgtctcctgggctggagtgcagcagtggcactctgcctcccgggttcaagcgattctcctctgtcagcctctagagttgtctggagttgtcagctcttccccttgcgtttcagatcctctggaccatgagcctgccgtgtctccattgctccctcgaaaagagcgaggtcccccggagggcggcctgaatgaagatgagcgccttctccccaaagacaaaaagaccaacttgttcagcgccttgatcaagaagaagaagaagacagccccaacccctcccaaacgcagcagctccttccgggagatggacggccagccggagcgcagaggggccggcgaggaagagggccgagacatcagcaacggggcactggctttcacccccttggacacagctgacccagccaagtccccaaagcccagcaatggggctggggtccccaatggagccctccgggagtccgggggctcaggcttccggtctccccacctgtggaagaagtccagcacgctgaccagcagccgcctagccaccggcgaggaggagggcggtggcagctccagcaagcgcttcctgcgctcttgctccgcctcctgcgttccccatggggccaaggacacggagtggaggtcagtcacgctgcctcgggacttgcagtccacgggaagacagtttgactcgtccacatttggagggcacaaaagtgagaagccggctctgcctcggaagagggcaggggagaacaggtctgaccaggtgacccgaggcacagtaacgcctccccccaggctggtgaaaaagaatgaggaagctgctgatgaggtcttcaaagacatcatggagtccagcccgggctccagcccgcccaacctgactccaaaacccctccggcggcaggtcaccgtggcccctgcctcgggcctcccccacaaggaagaagctggaaagggcagtgccttagggacccctgctgcagctgagccagtgacccccaccagcaaagcaggctcaggtgcaccagggggcaccagcaagggccccgccgaggagtccagagtgaggaggcacaagcactcctctgagtcgccagggagggacaaggggaaattgtccaggctcaaacctgccccgccgcccccaccagcagcctctgcagggaaggctggaggaaagccctcgcagagcccgagccaggaggcggccggggaggcagtcctgggcgcaaagacaaaagccacgagtctggttgatgctgtgaacagtgacgctgccaagcccagccagccgggagagggcctcaaaaagcccgtgctcccggccactccaaagccacagtccgccaagccgtcggggacccccatcagcccagcccccgttccctccacgttgccatcagcatcctcggccctggcaggggaccagccgtcttccaccgccttcatccctctcatatcaacccgagtgtctcttcggaaaacccgccagcctccagagcggatcgccagcggcgccatcaccaagggcgtggtcctggacagcaccgaggcgctgtgcctcgccatctctaggaactccgagcagatggccagccacagcgcagtgctggaggccggcaaaaacctctacacgttctgcgtgagctatgtggattccatccagcaaatgaggaacaagtttgccttccgagaggccatcaacaaactggagaataatctccgggagcttcagatctgcccggcgacagcaggcagtggtccagcggccactcaggacttcagcaagctcctcagttcggtgaaggaaatcagtgacatagtgcagaggtagcagcagtcaggggtcaggtgtcaggcccgtcggagctgcctgcagcacatgcgggctcgcccatacccgtgacagtggctgacaagggactagtgagtcagcaccttggcccaggagctctgcgccaggcagagctgagggccctgtggagtccagctctactacctacgtttgcaccgcctgccctcccgcaccttcctcctccccgctccgtctctgtcctcgaattttatctgtggagttcctgctccgtggactgcagtcggcatgccaggacccgccagccccgctcccacctagtgccccagactgagctctccaggccaggtgggaacggctgatgtggactgtctttttcatttttttctctctggagcccctcctcccccggctgggcctccttcttccacttctccaagaatggaagcctgaactgaggccttgtgtgtcaggccctctgcctgcactccctggccttgcccgtcgtgtgctgaagacatgtttcaagaaccgcatttcgggaagggcatgcacgggcatgcacacggctggtcactctgccctctgctgctgcccggggtggggtgcactcgccatttcctcacgtgcaggacagctcttgatttgggtggaaaacagggtgctaaagccaaccagcctttgggtcctgggcaggtgggagctgaaaaggatcgaggcatggggcatgtcctttccatctgtccacatccccagagcccagctcttgctctcttgtgacgtgcactgtgaatcctggcaagaaagcttgagtctcaagggtggcaggtcactgtcactgccgacatccctcccccagcagaatggaggcaggggacaagggaggcagtggctagtggggtgaacagctggtgccaaatagccccagactgggcccaggcaggtctgcaagggcccagagtgaaccgtcctttcacacatctgggtgccctgaaagggcccttcccctcccccactcctctaagacaaagtagattcttacaaggccctttcctttggaacaagacagccttcacttttctgagttcttgaagcatttcaaagccctgcctctgtgtagccgccctgagagagaatagagctgccactgggcacctgcgcacaggtgggaggaaagggcctggccagtcctggtcctggctgcactcttgaactgggcgaatgtcttatttaattaccgtgagtgacatagcctcatgttctgtgggggtcatcagggagggttaggaaaaccacaaacggagcccctgaaagcctcacgtatttcacagagcacgcctgccatcttctccccgaggctgccccaggccggagcccagatacgggggctgtgactctgggcagggacccggggtctcctggaccttgacagagcagctaactccgagagcagtgggcaggtggccgcccctgaggcttcacgccgggagaagccaccttcccaccccttcataccgcctcgtgccagcagcctcgcacaggccctagctttacgctcatcacctaaacttgtactttatttttctgatagaaatggtttcctctggatcgttttatgcggttcttacagcacatcacctctttgcccccgacggctgtgacgcagccggagggaggcactagtcaccgacagcggccttgaagacagagcaaagcgcccacccaggtcccccgactgcctgtctccatgaggtactggtcccttccttttgttaacgtgatgtgccactatattttacacgtatctcttggtatgcatcttttatagacgctcttttctaagtggcgtgtgcatagcgtcctgccctgccccctcgggggcctgtggtggctccccctctgcttctcggggtccagtgcattttgtttctgtatatgattctctgtggttttttttgaatccaaatctgtcctctgtagtattttttaaataaatcagtgtttacattagaa

SEQ ID NO: 3 - DNA, 32518 bp, Homo sapiens
agagccagcggacggaaccattccaaacagcctagtctcgtgctgagagcctctccggtttcacgctgagacccgctcacccccgctctggccccttagatgctattttggcccgagtgtcacgtcgggcgctctttagagaggactgggacaagagttgcggacgcgaagaacgagtaagcggtggttcatccctcctgaccccacccccgtggcctggcccgatggtcgcgcccggggttgcgagatttgcgcctgcgcagtgcggcgcctagagggaaagcgagagggagacggacgttgagagaacgaggaggaaggagagaaaatggcgtccacgggtgagtatggtggaactgcggtcgcgccggcggtagccggaacgcccaaactgggggtcgttcgtctctgggcttggctgggaagactgagtggagttgccgagagggggttgaggcacccgccgcggcccgacgagctcggggatccgcattcctctcccctcccccaaccgggcgggccggttctggaatcttccggcgcccgtggcgcgcggggggcttgctgcggcgggggcgcgcggggcccgccttggcctccattgtgtggcggtcctcgcgccctgagctccgggcctcccgccacgtgggcggggcctgcggccttcgaggccctgcgtgaaggggaggatttggccaggcctcaagccggtcactatgaaaccgccggggggcccgcaggctgctgtccctgtgaggcctccctccccgttttcagggtttcctgagaaaccaggggaaaaagcaaataaagataccgtggatttgtgggccgaggggtgccggcctatgagcgggagccccgtcatccttaagacccagtcggctggggcgtctggcgctgccgagctgccccctctgtggcttccagccccaagccgaacttctgctcgcctgggctttagacagaatgtgcttccctcctccagggcccccagtttgccgctttcttgggcttctccatttttatcgttattaatccacgtcctcccctcccccaaaaccaattaagtggcttcccagggccctttttctgcaaacgccgagggacatccgttgtataataaggccagcctgggtcgagagacgagaaacgctaccagaaagatatttctggtctctctgacctaggaggaacaaaaggccgagccttcatttgaattatgtttcagcagtggcctcgcacgtttattcgcctgcgttaggccggcaggcctgttgatttcgtaggtcgacagaggagaggggaaaaaaggccagtagaagcaatcttaaaggcacttgcaagcaagccccggttgggaactccaaaatgggagtagagtggtccttgatggaaggagcgtttaagagtgtcgcctagccatcacctgcagttcgcaatctgtgggtacactaacccgcgaaaattggcagggtggagcatttttgccccgggggtattctcaggccacctggttccaggccttagagacagtgggagaagatgagaaggaagacaggaaaagttctgggcactccagagtttttggagtccagaatccagcaacttaaggacagtttaagaattctccccatctgtggtcaataaacaggtaagtgttggctgttcgtgccgggataccaaagagtggataccaaagagtgccggtagaagagaggactgaaataccacagctaacctcccggtgggaagtggtttcctaggtgccctatccaccctcttctgctctgcaaaagcctgaaaaggcaaaacgtgtgcgttgacatttttgcgtggctggacgtgccttttttcagtcaactttgttcaaaccttgttcaccagtaactaccatgtgctgtactgtattagaattacagttgtggtttctgttgacacaaagtaaacacattaggcctggctgggggggccttcagagagtcacataagtaatctggtccttagtttcctttcctgtaaaatacagaagttaggctagacctcttaagcttttgagcccttctgaccttccagcataagcattccacaaatttgtcctatgctgacttcagctcaggtactgtgaagctcaactcaggtagtgtgaagcagcttccatagtgactgctctaaagtgttaaaccgttgccttgggttaataatagaagttttctctcctcgtatgttatctcatgtagaaaagtacgtaaagcatatatatccagtgcaacaaagaattggaatgcagactcgcagcaatctagaacccccagcgctcaatcacagtgaagtgatttttagtgaagtcagtggctcacttttgggggttaaaaacgaacacggttgctgaataatctgaccagtttgtaattgtattaggttggtgcaaaagtaattacgtttgcatcaacctaatagcttgcttgagggcctgtgatgtttgtgtgctctaggaagataaatgtaagttcatgaaacaaatttgctaccttctatagcccaccagttagtatagggccgaatcctgtggtttctcactgataagaggtcattggttgttccatatcagctttgccagtttgatgttttacataactgctcttgcgtaaaagtcgtcttgcaaacgttgaacttacatgacagtgatttacaatcacttctcaagcaaagacctcaacaaaacgtgggttaaaatatttgatgttaaatgattcattgctgtgtttattttgtagatgccacatggaaaaaatgatctgcatttagttttaatgtcagagagagtatgacttgtagtgctattgaaaatgcctttaagattgtcatgaacagattatttttttcattataggttagcctttgggcagttgatttgttcctcttggtgattcagggttttgagttaagagtgtgtacaaaggaaagaaagtagtccagtaaagtacagagaggtaggcagataagccaacgtgaagagatggattcagcaaagctctctcaggccgccgagggattgtgaggctggctttggattccatgaagtggatgccatgaagagctgtcaattgttggttttggatgagggactactttctgattggaaaataaaggaccccttttttccgtcctaatggcagtactgtcttcagacagaacaagatatgtgttcttgtggagaagaaagaattgggcagaattttcaaaaataattactttaactgcctttaaaaaaaaactaaatttatctaactttaatgcagtagcgctctgaaaactattttccgtttgtttttactacttgtagacacctcagtggaccagtttttggtccctttggatgcatgttataaatttcataggaaaaggaaaattatagggaggtttacttagataagggatgaaaattcatgtcttttttttaagttgaaatcattttgagttgtatgaaagacaatggtgttaccaaatttttcccagaaagactaaatgctttttcttctttgccagtcttcagggttctgccttagctctgcttcaccagggtttataatatatctagcttttaagttgctgcacaaatatagttctgacacagcaaaccctttaaaacactggagtgtggtgactgccttcttgtctgccattccgtttcactgtcgttgagctagggaatgatggtttgtctaacttgctaaagtgaggggagtgaaaactaatttttgaggagaggtaggttctaacgtaaccaatctagtgttaaactttgtattattgttgcatgcctccgttttatatgagggtagaaacttctgatcctgttagtagatcttgttgtcagtctgtgatattgatgatcatcctgtattttaaatgacagttgggattgggatgggttttgtggtcatgggaacataaaaagtatacctgccaaatcagctgatcttgacctcattagctagtcccacagtcaaatgttgagtttaactggtttagacttttttttctgttagatgttgagaggtaagggggactcatttggacctgtgttggcaggtctccctacagtttaaagaattcttcctgccacgtgaattctttcccccttttttctcttctccttgtttctgctaactttacactatttttcctccttgttttcctctagattacagtacctatagccaagctgcagcgcagcaggggtaagtcagtcttttataaccgtattttgtgtgtgattaatattttttgaatatggagccttctataattgtagaggtggtatttgaatgttctctattcaagttattgcatttaattcttttgcagctacagtgcttacaccgcccagcccactcaaggatatgcacagaccacccaggtaatctttaaaataattacatgtagctgcacctccaagtaaaatcagtatattatccagttatctttcagttatccagtaaaacaaatgagtaatgtgtttggaatagtaaaatacccaggcattttaaactttcacagtgggagtgcgaaggactccattgtgccatcataaatgaaaccattcagaagctgataattgactctttataactttttaatatgatttctcaagttaggtgccctgttccatgcttggtccttcttcattatgtttaaatttagtgaatttattcatcatagcaattctgcaaaggaagaggatgatatgaccattctgcagaggagaacattgcagtgcatagatattaagtaacttgccagtggttgcacagtaagtggcggggttagctctaaaaactggcgacctagccaaggagctgctgagctctttccagtgaagagtctgttgaaaagcctaggccaacagattctagaaattagccttctagtgttttcaagataatgttgaattctgaaatgatccatgccataaaatggatactaataactgccatggaaacatgttctaggacaagcagaatgtgatgtctctggcagatcttacataactggtcatttaaacaaacctagagaataatcatgctaatatctgaaagaacaactcttccttgcctgattttaagtattatggatgtctaagttcaaaagacagtactcttgatgtgcccaccataagaggacatacagcgttctggttcattttctttgaagtggtatagtagttttaaagtctttttgtcaggctgaaaatctggttttcaattttttctgacagattttagccctcttcattgctttctctgttcatttgtcttcgtaccttttgtttccaatcactaaaactgtgctacgctaagtgctagcagttaatacacctgtgcccttattgctcttcccttgagagtgtcttgttaatctcatgtatagttaactgaggttttgcctgattatcttttttttcccccttttgagaagctgtgaatgacattgcctacttacctaatgagctttttccgtagctaactttaccataatatgagtgaaccagataagggataacattcatgatactgtgattatttgtcttgttttgttgtttttgttttgtttttttaatcttctagaaaggaatgtttttgattttggttctccaatttagtccattttattgctaaaatacaaaagttcatgtatgaagttcttgcattcgtttttttttggagcaggcatatgggcaacaaagctatggaacctatggacagcccactgatgtcagctatacccaggctcagaccactgcaacctatgggcagaccgcctatgcaacttcttatggacagcctcccactggtaaggcctgccttggagagatttttgggtcgttctggctagggcattggctaagaagcttattagtcatgctttcggatgtatattctggtccataccttggcatctggggaatcctttattcttaggaagaggtattttttctctttcttccctactcttatagtcttgagagatctccaatagaatgtgggtgggataaattccaagagagaaaagaacttttaactgtttgaataatctcacgatgaaatggagactatgtaaaagattttgctaatgctaatactgagtaagaatgagtcttcttaaattgagctgcttaaaaatcaaactggttttcacatgtttgcttcatctgatagtgtaccctctactttttgttttgtgctttccacagtagaagggaccagtacaggtttgactatcctgctcattcttgcatgggaaatgctttccatcttgtctaaccctgtaatgttaatcctttaggtgttttcatttgttgaacccccaaactttctaacatcacacacagcaaggtgctaatgaaaaactgcttcaggtgccatttgcagatccatgtcctattctttatatgattttgggaaaggtttttttatttaatattactttgtttcaagccttaataatagttatttaccttcccaaaggtatttcaggtgatttctccccagctgattttcccctgttccctgaaggatagattgcatgatgagatttatttagaggagcagactgccaccctgcatgtatcatgtttgtctattggttggtttctagtccagacacattttattttctgttttaagtgttatgaattattttaatccatggtatgtcttgaatatatataacattattccaagatactaaaaaataaactattctaagaattagaagaaattgtattccgatactgaggttgggtgggatacatgaaaaacctatgataatttttttgtgttcagtgctgtgtaatgtttcaggctgtctccccctgcccttttattattgctgttataaaagactctaataaagtcttaaagatatcagagctcttattttcaaactgtctttagttctccaaattatatatagtccagttaaggggaaaaacctgtctgtaatttatctcattgagtaccagtgtcctgattttgatgggaagtaattcctaacctcttctagggtgtttctcaaataggatgggaaatgtttatctaaactttctagtggtgttaattgcagctgtgggaagagctggaactaaggttatgcagtttggattttttagcatagaattttgaaattgtgagataaacttcatgtattaaagccattacattttttaaaacaagcatgatgtgaaagttaatgtggcctagatctagccttccgaatccttagatcattttacaggaatgagacggagtgatttataggcaaattaatggttctctagagccatgtatcacattgtcgttggttgagaaatccccatcatgactgtgggcctaaaaagtacaggtcattctagtttagagactagtagctttgatgagctggagattgcacttagtaataataatgtttgtataaaattcacagtttatagagtggccttcttgtctcccttaatcctcccaagaacttttggggtataaaaacaccaaaattaagcctgatgagcaaactgtgtgaacaaaacttagcaggagcctaattggtagtgcgtgggttcaagcacacatgctgcatttttccttacctcatactgcctttacacatgaaagttatcggatagtcattggagggaatacatagaaatacactgttctcttctaggatttttaaaaattaaacttcagaagaaaggggttatataaacctcaattcaatggaattcttaaaaacttcttaatttttacgttgaacaaaagttttggtttgtgtaatatttcttaccacctttttccttcaagttgtcagcacatagtaggtgtgttttctttttttgccactggtcttttgtttttttgtttttttgttttttttttggtcattaaatcattttgctctgttgatttttgttcattttgcttggctgcttttgtgggtactacagattaattaaaaggttatttattaacccagtgtctattgctgtaatctttagcatgacaaggccctaactgttgctgcatagttttatgacatgagttattgccctgatcacttttagttttttgtttttttaattgccctccttgtaaatcttatagacgtgtcatgtagtggggtgtaatcggtatatgaacggtagggtagatggtattagattctaatttaaataaatgaatgccttatgtggttgaccttaggactctgcaaaaacttaagcagttcagatgaacaacatgccaactcaaaaacttttattgcttggggcttcctgttttctggaactatgtatactttcatacacattttaactcagcagttttgacaaggacattactatctctgtgtataatttcagaatttccttttaatatttgaggtagagaagaaagagtattattatattctgtgctacaaatggtgattgtacaaaaggaagctgatacttgtttctggccagtacatgaggacactttaaggccctaaatcttaactaaaatgggcagtcttgattcaggatttattttaaatatggaagctttttctttagtgagatgtagactttttttttggatataaatgccagcacctagaccaaagttttgttttgttttgtttttttaagatagggtctctgttgcctaggctggatcttactgcagccttgacctcccagcctcaagcagtccacccacctcagcctcccaagtagctgggactgaaggctcacgccaccatgcccagctaagtttgtttattttttgtagaggcgaggtctcactatattgcccagggtggtctctaactcctaaactcaagcagtcctcccacctcagcctcccaaagtgtaaaccaaactttttattgcatggcttaattgtacccattgaccatgaggaagaagagtccagcaccaggaatggttgtaacacctcctacaggaaaggtactctagttaggagctgcagactttcgtggttttggtcatgctccacgccgaagtcccgaagggaaaggcatggatcctgcctggtctggcagaggcaggagctagggatagaatgcatcttgctttgcagcatacctgtgaaaccaggttttttctgacacctggttagtgaaatactgaaggggaggagagactctagggtttacctccaatattgctgagcaggaaaaaggccttttgcttgtggtaggtaagtaagaggaatggagctgagtaacttgataacgaggcaggaatctgctttatgatgtgaaaacattaccttttaaatgtttgtttggagcaatatcgaagtttaattttaaataatttacaaaaaaaggataaactgtgttaagcaactataatttatagcttatttttattaatcatgtgctcaagtaattaagcttgtgcttcacatgatgttagtgcttgggaccaaaagaaagtgattaaattaattactacccaaattacaggttttagtgctagaactagtacctggatcattttctaattattttaaaatgctatgtcatttgccttttaccttttcttctgggatgttttattcctgcttgagggtattttggggtaagtttgtttacaaacttgttaagacgacctgctagcaaaatcagtacagacttggcaaaaacagacttgtctcctattcacagcattcaagagggggcagaaggaaccctgttttctgtagcatgacatgccatttctgttaggtgtggttttagagcaaatgagacagttactttaccaaaaactaggtacattcagagaacttaggctttaaataccagtttgttgctactcttgcggaagggggaatatttaaagggattcaatatcctgatggtttaaagtaagtggtttacaaattgttctgataatgagtgtctaggcagatctctgaggggacctgaaatctgatgcagctctcctttgttctaggttatactactccaactgccccccaggcatacagccagcctgtccaggggtatggcactggtgcttatgataccaccactgctacagtcaccaccacccaggcctcctatgcagctcagtctgcatatggcactcagcctgcttatccagcctatgggcagcagccagcagccactgcacctacaaggtaaggccatggtgtccttaatgcgtcagtcttatgttggagggaaagaaagcaactgtgtacacttaaaataatctgtggtttagttccttattagtggttgctttcatatactctcagatgttcactgttagtaactgatgtgctagaacataccacagaaatattctgcatttaacagtgaaattggctgggcgcggtttctcatgcctgtaattctagctctttgggaggccgaggcgggcggatcatataaggtcaggagtttgaaaccagcctggccaacatgggtgaaaccccgtctctactaaaaatgcaaaaataccgggggggcgcagtggctcacgcctgtaatcccagcactttgggaggccgaggcagggggatcacaaggtcaggagatcgagaccatcctggctaacacggtgaaaccccggctctgctgaaaaatacaaaaaattagccgggcatggtggtgggtgcctgtcgtcccagctactcgggaggctgaggcaggagaatgtcatgaacccgagaggcggagcttgcagtgagctgagatcgctccactgcactccagcctgggagacatagcaagactcggtctcaaaaaaaaaaaaatagaaaaattagctgggcgtggtggcgcacacctgtaatcccagctactggggaggctgaggcaggagaattacttgaacctgggagatggaggttacagtgagctaagatggcaccattgtactctagcctgggcgacagaggaagacttcacctcaaaaaaaaaaaaaagtgaaatggtgctatcgaagggtcaaaatgaggaatggcactgaataggttctctggtttcagaatgaccttttagggtaggagaaggctattgtttttaaacccagaagaagagagagagagagtgtgtgtgtgtgtgttttcactcaaaacagcataactgatagaattgtacttttgaattgtacttttgatgcttttatctttgatttcattgaccctgtaaatgggtaaccgctttctctttggcaaaaacatggtagttcacacaggcaggaggggaagggagcatcatgtgagtcaagaaatggtcgtatgacctaattgtctggaaaggacataaccatattcaagaaatcaaacattactgtctcggcttaagcaattgacatgacttccctacattgtatagaggcttaatctaaatattataggcaaataaaaattcttaactgggtaccctgctataggatgagcagagctcataccccatgactggttagcaggtaaacagtataattattacttaacaaaagattttagatctttgctttaggcagtcacttaactggcttgtgtatacagtcttgaaaggacattgaattctggtttgaaagaagacattttaggaaatcaacttctaacctagatatatctgctctagaggtaagaaattagctctgacaaacactcgtgaaattacttttaaaatgcacagtgagtaatcggagccgcttggcaatttacccttggtagaccacctttgcagtagctaagttaaacttagtggcttattcctgaaaggcctcatttccgagtgtcatcagatgtatgaagtcccatttgatactctgatgcaacagtatatccaagccatatctggagggttttatatatgaattgggttttgataagtcatcctttttttttcttttcacttgttaccactttaaaacagctgtctgtctcataatcagtggcaactgctttttcgactggaaaagggtatgggacctatttcagctcaggaaaagttagtacttcacaccctctctggtttttctgggttggttggttggttggttggtttttgagatggagtgttgctctgttgtccaggctggagtgcagtggcgagtgcacccaccacccaggttcaagcaattctcctggcttagcttcccgagtagctgggactacgggcatgtaccaccatgcccggctaatttttgtatttttagtagaggcaaggtttcactatgttggccaggctggtctcgaactcgtgacctcaagtgatccgcctgccttggcctcccaaagtgctgggattacaggtgtgagccaccgcacccggcctgcctgttgattctttggactttgcttaaaatattaatagctctaactcagtctgctgcagccttgatgtaaagtgttagggccaagaggtaatagaaacccctggagttttccttggaactgagattaattttcgtcatttaacagggatacttacttccaggttcatctgagcagggacttgggaggggtctctttgccttactctggtgtttccattacggagactttgagccaagttagattagtttatggcagcccagtttaggaaatgatttttttctggttggttggatggtttggttggttttttttttttttttaagatggagttttgctcttgttgtccaggctagagtgcgatggcacaatctcggctcgctggagcctccgcctccggggttcaagtgattctcctgcctcagcctcctgagtagctgggattacaggtgcccgccactctgcccagctaattttgtgtgtgtgtgtgtgttgtttttttttttttttttttttttttttttttttttttgacagagtcttgctccgtcgcccaggctggagtgcagtggcgccatctcagctcactgcaagctccgcctcccaggttcatgccattctcctacctcagcctcccaagtagctgggactacaggcacccaccatgatgcctggctaattttttgtatttttagtagagacagggtttcactgtgtttgccaggatagtctcgatctcctgacctcgtgatcctcctgtctcagcctcccaaagttctgggattataggtgtgaaccaccgctaccagccaattttttgtatttctagtagagacggggtttctccatgttggccaggctggtgtccaactcctgacatcatgcaatccacctgccttggcctcccaaagtgctgggattataggcatgagccaccgcacctggcagtttgttttttttgagatggagtctctctgttgcccaggatggagtacgcgatctaacagctcactgcagccttcacctcccatgccccagcagtccctcccacctcagtcttccaagtagctgagaccacaggcatgtaccaccatacctggctaatatttttctatttctgtagaggtggggtctccctatattaccaggctggtctgaaactcctgggctcaaaccatcctcctgcctcagcctcccaaagtgctgggattttttttgtttgtttgtttttgagacggagtcttgctctgtcgcccaggctggagtgcagtggcgcgatctcggctcactgccagctccgcctcctgggttcacgccattctcctgcctcagcttcctgagtagctgggactacaggcgcccaccaccatgcctggctaatttttttttttgtatttttagtagagacagggtttcactgtcttagccaggatggtctcaatctgctgacctcgtgatccgccctcctcggcctcccaaagtgctgggattataggcatgagccattctcgcctggccttgacctggtctgtttttaataaatgagaaacataaacccacaaattctctaaatttatgatgccatggacttacgtaaatgttacttcaacctaaaacttaacattattgttagtttctggtcttcagcagtcccctttgagaaaaagcatttattccctaacagatcacttctcccggatcacctaaactggtagcacacaatatcgcaacgcacttttatagcgtttactgtgatgaatggagcatattaatgtctcttctgtggatatgattgattctcccccttccttagtgttgtcttcaagcaaatatagttggaccgacactgagtttgatgtagtttactttaggattgtatttattattgtatttatttccaggcttaatcataacattgcttattgctcgtagctttgtagcattcttacccaggagttttgtggttgaccaaccacacaaaaaaagtcactttttaattttatttattatttctcctcttagaccgcaggatggaaacaagcccactgagactagtcaacctcaatctagcacagggggttacaaccagcccagcctaggatatggacagagtaactacagttatccccaggtacctgggagctaccccatgcagccagtcactgcacctccatcctaccctcctaccaggtcagtctactttttgtggcaaaacaaaaacagtgacaaaacagtttttttcaggttgttgaccagcttgctttgacttcttcagctaaggtatgttatctgactgtcgcagtgataagtcatctgaccatacttggttacattaaagcctgagatctagggtcccatagtgttgcctggcagctaataactattcttttttctttttttttttttttcccccgagacggagtctctctctgtcgcccaggctggagtgcagtggcgcgatctcggctcactgcaagctccacctcctgggttcacgccattctcctgcctcaacctcccgagtagctgggactacgggtgcccgccaccacgcccagctaattttttgtatttttagtagagacagggtttcactgtgttggccaggatggtctcaatctcctgacctcgtgatccacccatctcggcctcccacagtgctgggattacaggcgtgagccaccgcacccggcccagctaataactattctttctaaatacaaaaacatttttaccactctaagttctttctttaagtttcttccttttgctgttttagttaactcagatgggaagcagaagtatatgaaagcatgtaaatagatgtaagagccatcttccccaatgcagttaggataagtaaagcgcagggcattataattcaccttaatcattttacattttacctaacacataaaggtttattcatgcactaaccttttaatgtatgggccaactctttttattttatttttattattatcgcctggccaagttttcttttttgagacagagtctcactctgttgcacaggctggagtgcagtggcacgatctccgctcactgcaacctctgcctcctagggattctcatgcctcagcctcccgagtagctgggactgcaagtgcatgccaccacacctgactaacttttctttttgttttattgttgttttgagatggagtttcgctcttgttgcccaggctggagtgcaatggcacaatctcggcttactgcagtttccacctcctgggttcaagtgattctcctgcttcagcctcctgagtagctgggattacaagtgctcactaccacacctggcaaaaatttttttttttgtatttttagtagagacagggtttcaccatgtgggccaggcttgtctggaattcctgacctcaggtgatccacccgcctccacctcccaaagtgctggggtgacaggcgcgagcccctgcgcccagccagtttgtttgtttgttttgagatggagttttgctcttgttgcccaggctggagtgcaatggcgtgatcttggctcaccgcaacctctgcctcctgggttcaagcgattctcctgcctcagcctccctagtagctgggattagatacagacgccaccacaaccggctaattttgtatttttagtagagacggggtttctccatgttggtcaggctggtcttgaactcccatcctcaggtgatccgcctgcctcggcctcccaaagtgctgggaatacaggcatgagccactgcgcctggcccagtttttgtatttttagtagatacagggtttcacaatgttggccaggctggtcttgaactcctggcctcaagtgatccgcccaccttggcctcccaaagtgctgggattatgggattacaggtgtgagccaccatgcccagcctgcaagttttcttaacccatgtttaattagatgtgggttttcaaattgtttgaattgtgccctgaaagttttgctagaagtagcggttcccttttttgcactcatttcattgttttgcagcagatgtgaacaggtttaggaacaagtagaattgattgggtgtctctccatacagccagcttggagcaaaagtgggtagggcttacaacccttcttccacagagcaggttcgtacctattgcattgagagcagttaatagcagttaatctggcaagttggataggtacacagtgagagattattgaattcatacagcaatggtgagggatgtggtgtgttagaagctttgtttgtttgtttatttttggagaccgggtctcactctgttgtccaggctggggtacagtgacacagtcgtagccccctgtagcctcgaacttcctggcctagtttaatcggactttaaaatatgtgtccttactgtttctcatcatgatttgtaaagcttaataccagatgggtttttttgtttttgtgtgtgttttgttttgtttttttgagacggagtttcactcctgttacctaggctggagtgcaatggtgcgatcttggctcaccgcaaccctcgcctcccaggttaaagtgattctcctacgtcagcctcccaagtagctggcattataggcatgtgccaccacacacagctaattttgtatttttagtagagacggtgtttttccatgttggtcaggctagtctcgaacccctgacctcaggtgatccacccgtctctgcctcccaaagtgctgggattacaggtgtgagccactgcttctggcccttgtttttttttttttttttttgagatggagttttgctctgttgcccaggttggagtgcagtggcgctgtcttggctcactgcagcctctgccttccaggtttaaacagttctcttgccgcagcctctcgagtagctgggactataggcgtgtgccaccatacccagctaatttttgtatttttagtaggtggggtttcactatgttggtcaggctggtctcaaactcctgacctcaggtgatccacctgccttggcctcccaaagtgctgggattacaggcatgagccttcaaacctggccaataccagttcttttcaagcttcatttctgtgcaagaatgtatctattaatttctcccatgtaattgacataatcttaatatttgtctttcatacaattccttcattctgaagtttcctctattaatactcagatttcatagttaatcaggcatgtctgaaagattgaaagtagcaaagacaaatctttgagggaaaactactatttttgtgttgagtacccttatcccttcagaaaatcgttaactcgagattattggcgggcaggcttggaactgaatgcctcacttcactctctctatattttctcagtccccatttcactgggtcagccttccccaagtgcatattcttgccacaatacaggaagcatctaaactcccatatttgcctgccttgaatatagttgaaaatgacgttttgttttgttcttttgagacggagtctcgctctgtcgcccaggctggagtgcagtggcactatctcggctcactgcaagctccgcctcctgggttcatgccattctcctgcctcagcctccccagtagctgggactacaggcgcccaccaccaggcctggctaattttttgtattttttagtagagatgggggtttcaccatgttagccaggatggtctcgatctcttgacctcatgatgtgcctgcctcggcctcccaaagtgctgagattacaagcgtgagccaccgcacccggcctgattttttgggtttttttttggagacggaatcttcactctgttcccgagtcgccaaggctggagtacagtagcggatctcagctcactgcaaactccacctcccgggttcatgccattcccccagcctcagccttccaaagtgctgggattacaggcatgagcctccgctcccagctgaaaatgaccattgttttaaatgggagtggcgattaagagaaaactctttaaggattatacagatggtggttataatatttccccctcccagctgggcaccgtggctcatgcctgtaatcccagcactttgggaggccgaggtgggcggatcatgaggtcaggagatggagaccatcctggctaacaagatgaaaccctgtctctactaaaaacaaaaaaactagccaggcgtggtggtgggcacctgtagtcccagctactcgggaggctgcggcaggagaatggcatgaacccgggaggcagagcttgcagtgaccggagatcacgccactgcattccagcctaggcaacagagcaacactctgtctcaaaaaaaaaaaaaaaaaaaaaaaaaatttttttgttttaccctcccatttaatgttttattctgaacacaaaagtatttgctgagttgaaattcaaattgttgatgtgtagaaagtaactactgttttatggatgtctgtgtcacatggtgtgaatgtctcttttattcaggggatttgaaataacaagcctctttctaaaaaagcttttttttttttctcttctctctctttcagctattcctctacacagccgactagttatgatcagagcagttactctcagcagaacacctatgggcaaccgagcagctatggacagcagagtagctatggtcaacaaagcagctatgggcagcagcctcccactagttacccaccccaaactggatcctacagccaagctccaagtcaatatagccaacagagcagcagctacgggcagcagagtgagttgctaagagagaaaaccaaataagaatgaatgtgtttagagtttttttgtggggttgattttttttgttggtttgtttttcttttgagatggagtttcactcttggggctgaggctggagtacagtggtgccatctcagctcactgcagcctccgcctcctggttcaagcaattctcctgccccagcctcccgagtagctgagatgataggcgcctgccactatgcccagctattttttgtatttttcgtagagacggggtttcaccatgttggtcaggctggtctcgaactcctgacctcaggtgatcctcccgcctcagccacccagagtgttgggattacagtcatgagccactgcgcccagccacgtttggagtttttgaacagggggaatactctttgccattgtttgcttttggaatccaggacacatctttagggcatggcattccagctaacatcttggatgccccagtgaagatttcagtgcttttttccaatttgtttttagtatgccttggcaaaaaagaaaagagatactaattgatcagaaaaaatgttttagactgctagccctgctgtctttggggaagttgtatgcagtgagtaaattcaacatcgtttttggcctccctatcagtcattaatgtaaagtggggaggcagctattgcaggccactatgattttgatagtcaagtaaaagctatgtttttttgttgctgtttgtttatatccattaaggggaaaaatggccaggcatggtggctcacacctgtaatcccagcactttgggggaggccaaggcaggaggatcacttgagaccaggagtttgagaccaccctgggcaacatagtgagaccctgtctttttaaagataaataaagattctttaagaaaatagaaaaggaaagggggaaaaataatcctcctcacagaatatttgcagttcttctgtatggagagaggtaaccaaaacacataattatcttcagaatttaggatcattgctctttttaaattacattctatccacggggatttctcaacaactcaaaggagtagtgttgatttatggagctcagcccctagcagtgtgctaaagccctaagaaacctggctctgttttcatttcttgagtttagctcaaaagaagctgcttttggagacatcttaggatatagaaccctataaactatatgttagccagagggctttttttgttgttgttatttagaagaggtttattataggctaactatataaggttatttcagctgtgatgatccagcagttttgttgaacttaaaagagcctacctattaaggatgctttatcgtgatgtaaagaagatggtgccttggttagtgccttggaattgaggattttgtgattccaggagaaagtacatcaggcagtggtgtaaatgctggtccatggcttacagatgtgactctttcctcaggttcattccgacaggaccaccccagtagcatgggtgtttatgggcaggagtctggaggattttccggaccaggagagaaccggagcatgagtggccctgataaccggggcaggggaagagggggatttgatcgtggaggcatgagcagaggtgggcggggaggaggacgcggtggaatggggtaagagcaaaccttttctccttttacctaattttgtttcatccataggattttcagtggaaagaagggactgaaagacataagaaattaatttctgcatttccatggacaatctgttgagctcaagccatcttctaaaacatggaaatgtcatctttgtggcatatattaagtggcagtttattttctttccctgccagtatacttcgttgggtcggggagaacaaagaatggttttgaaaccagagctttcagttcccttcatggtttccagaggtgagaagcctctgtgggtagtagatttgggatggaacacacacaacccttctaatgaccctaagttgttaactaactgcctttgaatggttgtcttgaaatacctggtgtatatactgcagaaaaggaatgcagctgttttccacagtgtttgtccccaacttctgtttgtactcagaatcgttgaacatatgaagattttggtcccataatccttaaactatagcctgaggtgcacctgattacatagagtttggatggagcaaagaaaaatccaatagcattttgcagagtaatgtatataattatgggctcacttcctactggagatgttgaaagtctaaatcggtttgaccattttgattgatggcacaatctggtttagaaaactttgtttagatcaatgacataaccctgctgcctctgcctgcccttcccctcccttctcccatccccttttccctatctggtgtctgtactttgatgaaggtgagctataatattggtggttaacataatccagaaggcttagttctgtgtgtgttctgtccctatataaactggtaaagaaaaaaaaaagttatgcagaatgttagatatttacatttgatacggtgtgccactattcaaggaaaaattaaatagcattttttaaaaaacagaatgaacttcaaaattaaagttgatttttaacttccatattagcaaatactcttcactactgaaagacagtactattttgcatattctgcataactttaagaaagtctttagtgaaatctttattggaagaaagtcatttgacaacaggcaaaaatttaatgattcggtatgaagtaaaatcaatcttctgatttggaaaatactctattataaaggtttcacttctttttggatgttttaaaatagacatagacacttgaaagtactatcatcacgtctcaaatcacctagaattcctagtatttttaaattgcaaatacaatttcaagtttatttaaatactccagaagttataatcctactaattgtgctagactttgctagtagagggggcccctctttctggatgagaagtctctcttgcagccatagaagagaccatggctttccccataggtttttcaacagactgtgaagcagtctgtcggatcctgtggggatagacgggcatttccctcgttgcccccctttttattgtggtgtggtgatggttttcagtgtcttgtacaggtaaggcactcaatgttgttaacatgccctttttcattgcctcagtattttgatattttcattggctgttaaacgtggaaactttttaacatgctttgtcgcatttatatgctacaggttacaaagtgagagccttgtatacacttcaatacttaaaaagtacccgtactcagtactcagccggcagcataatgaaaagtgggactagacacggtgtccatatggagaggaaaaatatacatagaatatttttaacaaaatgtattcattgtataaatggaatccttctgtaactttggtaactgcatacttgttgtttggtaatgaaccagaggaggtataatactctagaattgtgtaacattaaagtgtaaacttttgtgtttaaagagagagaacattttatggtgtgtacttttaaaaaggaaacaaagctgcatgcaacagcttgaaattgtatattcaggtattaaaggtgcaatactggttagaaaaaactcagggcctcccactggggagctgcctttatttaattttaaagaaaacaaaatctaacccaaaaagtccaattcatatttccctctcccctctttaagtaattttacatggccatagtcattattctaactgatatgtctataaagttgcacccccagtccgttgagccttggtatttgttgtaaattctcctttcacagcgattgttaaatctattcgtgccctgagatgtatggctttatgctgaagattggctggatgcgtcctctgatgtgtgttgtaggaatttaatgtggttgtctcctgcttttattatactgtgacttgttaggaaaccctgggcctcatttggctctcccttgggagaggttgagggtgcacctttatgaacatggaaaggtttatcacagcagttaacccccacttgctcctcccctctataccaagctcttctggtttttcacctgacggggtgggtgtttgggatctattttttcttgctaatttgccaagtattgcactattaataccagcccccgaaatgaaaggaaccaaccacactggtgtgtacaatcagacaagcaaggttgtatattgaggaaatttgagcaagctgccctgaagaaaggcatagtgacaagatgagagagatgcattgtttggagatgtgtttagccagtgcccttcttccccacgagcccccccaaggctcagagcggtactggcttttaaagggaaaggccttcatttcttcgtttatccccccagcagcgctggagagcgaggtggcttcaataagcctggtggtaagtttttgagtattaccatagatagtgtttaaaaaaaaatgcagtcagtttttagaaaactataatttttttattagtttcataagtggtttaaaaatgatctatacaaaagagactaatgggtactgccggcattgtcttaggggttaataaggttaacctatggttacaaaacaaagggtaacttgaagtattgagtaactgcttctgtaatatgggggagaataaatttttaaatttggtttatttagaggaaaaattttgacttaaatttaacactgatttggcacataagcattgagagtgtatttggttaatggtttagaagcaaaccagcaaaggaaaaaagcaaaccctagcaaacctttcacaaatgttaaagagacactgctccattttagcagtgcgggtcattttgagtttaatgaatccccatcaaatggtggtatagtagatagctatgtgtgtttgtaaggtttgtagcttgcaagacgtgcactaataatattttatatgatctttcctggttggcaggacccatggatgaaggaccagatcttgatctaggtaattttgaattctagttgtgcttcatatcgtgctttgtaaattaatggtacagaggtaaatgcatgcgtagagttcagcagccttatagaccagtgtgatattcttgctgtcaaggacagtttgggaaatcctatgtgagcatctactcataattgccttaagtgaagtaaaccaaaagtttgatagcattcttcttagtatgcttggtagttttcttagatttatgatgaatatccttgggcagtagtgatcaggtagttaagaaacccctatagatacatgataataattctcctgtcttgttgtctctgaaaggcccacctgtagatccagatgaagactctgacaacagtgcaatttatgtacaaggattaaatgacagtgtgactctagatgatctggcagacttctttaagcagtgtggggttgttaaggtcagtaaaagcataaccaggtcatctggcagaactttaaaccacagagcattttaaagagattgaattgatgttgagagttgttttctaaggttgcctttgcctgacttctttctaggtatcttatggtttgttcctttttaaaaaagattagcctttttttttttttttttttgagacggagtttccttcttggtgcccaggctggagtgcaatggcgcaagtcttggctcactgcaacctctgttcaagcgaatctcctgcctcagcctcccaagtagctgggattacaggtgtgcgccaccagctaattgtgtctttttagtaaagatggggtttcaccgtgttgggcaggcgggtctcaaactcctgacctcaggtgatctgcccaccttggcgcctcccaaagtgctgggattacaggtgtgatcccctacgcccggccttccctcctccacccctagggacagagtgttgctcaatctcagcctcccaggttcaagtgattctcccaccacagcctcttgaggtagctggacttataggcacatgccaccacacccaactaatttttatatttttagtggagatggatttttgcctgttggccgggctggtctctaactcctggccacctcaagtggccacctacctcagcctcccaaattgctgggattacaagcatgagccactacacccaacctcaaattattgtgtctttatgctaattcttcatagctagtaacgcagattttttcttcagggattttgactgtttttcagttcttgctcttctgtattagagttagtttatgaaccccataaacctcaaaaccttaaaaccccaattgaatatttactaaatctatgaagtaatttcaggagaatttacatttttatgatactgagtgatctttttttccccatgaagattttatttctccatttatttgtatatttatttgcttatttatttactgagacagtcttgctgtgtcaccaggctggagtgcagtggcacgatctcggctcactgcagcctctggctcctgggttcaagcgattgtcctgcctcagcctcctgagtagctaggattacaggtgcccgccaccacacccagctaatttttgtatttttagtagagatggggtttggtgaaaccatgttggtcaggctggtcttgaactcctgacctcaggtgatctgccgcctcaactcccaaagttttgtgattgcagacatgagccactgtgcctggcctgtctctatttgttattttattttactttgagacagagtctcactccttcacccggctggattgcagtggcgcagtcttggtttactgtaacctctgcctcccgggtctccttgcctcagcctcccgagtagctggaattacaggcgcctgccagcacccctggctaatttttgtaagtagagatgggatttcaccaggttggtcaggctggtcttgaacttctgacctcacgtgatccacccacctaggcctcccaaagtgctgtgattacaggtgtgagccaccacacccagcctatttagatcttcagtaaagactatcgatttccttaaaggtcttgcaaattttactagttttacttctaggtttcgtttattttcaagttgctgtggttaagggtcttcgttaaatgacacttttctggttattactggtgtatagaaatacagttgatttggccgggcgcggtagctcacgcctgtaatcctagcactttgggaggccgaggcgggtggatcacgaggtcaggagatcgagaccatcctggctaacacgatgaaaccccgtctctactataaatacaaaaaattagccaggcttggtggcgggcacctgtagtcccagctactcggaggctgaggcgggagaatggcatgaacctgggaggcggagcttgcagtgagctgagatggcgccactgcattccagcctgggtgactgagtgagactccgcctcaaaaaaaaaaaaaaaatacagttgattttgggcgggcgtggtggctcatgcctgtaatcccggcactatgggaggccgaggtgggtggatcacgaagtcaagagatcgagaccatcctggccaacgtggtgaaaccccgtatctactaaaaatacagaaattagccgggtgtggtgacacgcgcctgtagttgagctacttgggagtctgaggcaggagaatcagttgatcccaggatgcagaggttgcagtgagctgagatggcgccactgcactccagcctggcgacagagcaagactccatctcaaaaaaaaaaaggaaatacagttgattttggtaaatcttatataaggtgatttctccctgcttgtaggtgtgtgtgtgcacagatatcacacacacctcaaaagtaaaatgcttttagtgtctactgtcacattctaccctgtgcaagactccttgtttgcttttttgttttgagatggagtcttgctctgttgcccagactggagtgcagtggcacaatttcagctcactgcaacctccgcctcctgggttcaagcctcaagcctcttgagtagctgggagtacaggcttgagcatattaaaaagactgctttttaatatgtatataacatgtagtttattgaggaatgtggagtttatcctggttaagaaagtagtatttaccatcaaaattttggaaataaagatgttaaaatagatttccaagctggatacagtggctcacatgtgtaatcccagcactttgggaggccaaggcaggaggatcccaaggattgcttgagcccaggagtttgagaccagcctggacaacagagtgagactctgtctcacaaaaaagaaaaaaatgcatttccacattattcataccacagttttgccatattttcttttcagtttttagggtatcacgttcctttttttaagtcagaggtatcaatatatatatcctgttgtaatcttttttaagtcctataaatagattgctcttgtgttactggatatatgtaaacaattacagactaaactgatcgtgtgcatatataatgcaaaaaagtacacgtgaagatattcttatacaaggtagctcctgaattcaagtcaaccacatctgatattcagctgaaagactagtcatctgttctaactggaggaagtagtggctgtgttagactaaccaagaatccctgtagttcactcacagcctgtacactgtccttcacggtttaaggataattttctttatgccagtcatgtcttatgtggtggtatcaaagtctgactacccctacgaggtggctgtgctcagtggatacctgtctgggcatagaaaatgccagggcaggcaaaccagcatcagaagatggctaaggcaggagtggggcctatcctgttcacttccacactttggtctactttggtttttatgataaagcagggatagaggagaaaataacttagaattctgaaaaacttaaaagcggagaaacggtgacatttagtgacttactacatgtgagaaattggtacttttcctggattttgcctggacttttttctcccaaattagtatattctagtcatgcctaactatgctattctttgtctagatgaacaagagaactgggcaacccatgatccacatctacctggacaaggaaacaggaaagcccaaaggcgatgccacagtgtcctatgaagacccacccactgccaaggctgccgtggaatggtttgatggtgagatgtactcactggcattcttaatctccctggctatagaatatggcatgagggagaaacttgtgaaccataggagcaagaagaccttccatctcttcctgggggaggtagatggccggtctccctgcagtagtagtagcacccagccattgaccctggatttggagatccctttattttgaggcattagtattacaaatcaaccttgcttaaagtggcaaacacttcctaagcacagattatcagaaggtacagaaaacccttcaaaagaacatcttagccagtgtacatttgcatatagataaatatatatatttaaatgaggccttgacattaatggtgggatttcacttcagacaaaaccaacttgaaagcattgaatgacttggccatgtccagtggcttgcacctgtaatcccagcactttgggaggccaacatcggtgcattgcttgaatccaggggcttgagaccagcctggggaacatggcaaaaccctgtctctacaaaaaaaatacaaaaattagccaggtgttgtggcacactcctatacctatagtaccagccactcaggaggctgaggtgggaggatcacttgagcccggagagtttgaagctccagtgagctgagattgcaccactgcactccaacctgggcaacggagcaagactctgtctcaaagaaagtgtcaaataacaagtcctggttctgttttcttggtcatgcagtcagcttcccaccagcttattttcctccttatggtagacagtgttttttgcttgtgttgttttttttgagatggtctcactttgtcacccaggctggagtgcagtgacacaagccatctcagcttactgcaacctccacctcccaggttcaagccaatcttgtgcgtcagccactcgagtagctgctggactacaggcgcatgtcaccacgctgagcctaacttttgtattttttagtagagatggggtttcaccatgttggtcaggctgtaggaaggtttttaagtgtatttaagtatggcctttttctggccaggcacagtggctcttgcctataatcctaccacttcaggaggccaaggcaggaggattgtttgaaccaaggagttcactagcagcctgggcaacctagtgagacactgcctctacaaacaattttgtaaaattagtcgggcatggtgatgcgtgcctgtagtcccagctacttgggaggattgcttgagcaagtgagattgaaactgcagtgagctgtgccactgcactccagcccgggcaacagagtgagactcccatctcaaaaaaagcctttttctggccttgtcattaaagatcttagagaagattacaggcagacctaatgcatctgggagtggtcatttgatgatgatgtggagttggtgaacagggagtacaggggagtaattgatgttctgttgtcttgttccagggaaagattttcaagggagcaaacttaaagtctcccttgctcggaagaagcctccaatgaacagtatgcggggtggtctgccaccccgtgagggcagaggcatgccaccaccactccgtggaggtactttttctgagctcctatgttgcattaaaaggttttcagtacacttcatacccttgagaaacttgattattagagtgaagaaatataaaattgtgtgtagagtcaatactagactatcgagagctaacaatgaatgtttgttgggaataaaaggaagagaagaacatgggaggctggaagccactctgcctgtcaactccagactgccatttattcagctttggttgtgtctgtatagacatgcctattccttacagaattgtgggagttcagccaggtgcagtggctcacgcctgtaatcccagcactttgggaggctgaggtgggcggatcacctgaggtcaggagtttaagaccagcctggccaacgtggtgaaactccctctctactaaaaatacaaaaattagccgggtatggtggtgcatgcctgtaatcccagctactcgggaggctgaggcaggagaattgtttgaatctgggggggtggaggttgcagtgagcaaagatcgtgccactgcactccagcctgggcaacagtgtgagactccgtctccaaaaaaaaaaaaaaaaaattgtgggagctctgtttctgtagagcacgtggaacacgctcctcacagggaagggggctgatggcctgagccacacggaaacacgggacaggtgatggggaaatgacagcagtagtatctgtgggtttacttagtgatttttatttcctatagcaaatttggtgctacagagaaatgatttgctgtttcttgttgttcttgttgtaggtccaggaggcccaggaggtcctgggggacccatgggtcgcatgggaggccgtggaggagatagaggaggcttccctccaagaggaccccggggttcccgagggaacccctctggaggaggaaacgtccagcaccgagctggagactggcagtgtcccaatccgtatgtacttgtcttggcaaattgataccctacgagtgaagccacccttccctcaccccatccccactctagagtggattgctctgtctagaggaacagaatgatgaccctgatggctggttagggacactagtcagccattcactggacgcttcagagccttctgaagattgatttgacctgtcctgtgggtgcaatgctgcctgaggctgtgccctaaagcatgggtgtacatagatcctcttgatagtgagtgtgtacctgttcacacaccacctttccttgtttatcttccttagttcaattggtgatttctgctgtgatgtaattgtatgcaggggttgtggaaaccagaacttcgcctggagaacagagtgcaaccagtgtaaggccccaaagcctgaaggcttcctcccgccaccctttccgcccccgggtaggtgcaggtttcatgagtgtcccctcagcttcctggtgctaaacctcttttcttatttgtgggcttggtaaactgcagttgccctctgcttaacaactttgagttgtcgtgtcctcatttctaaattgtcagcccgatgccgagattgagtgaagtgtctggtttgttctgctgtgagagaaggaagcagagcagcttccacagtgtccacagggcctctgcagccacccactgactgctttcgccctgctattctcaccttaggtggtgatcgtggcagaggtggccctggtggcatgcggggaggaagaggtggcctcatggatcgtggtggtcccggtggaatgttcagaggtggccgtggtggagacagaggtggcttccgtggtggccggggcatggaccgaggtggctttggtggaggaagacgaggtggccctggggggccccctggacctttgatggaacagatgggaggaagaagaggaggacgtggaggacctggaaaaatggataagtaagtgctggtgaaaagcagctgtgggccgccaggcacagtaagaggacagcccttcccagcttggttggcgcaagtcctcatgtctctaggaagcttgtgatagtggttgggaggagccaggaaggggcacctgggggctctggaagggcttcctcaccccttcccattctaaccgattgggaggagccaggaaggggcacctgggggctctggaagggcttcctcaccccttcccattctaaccgaagggccctctttaccttgcagaggcgagcaccgtcaggagcgcagagatcggccctactagatgcagagaccccgcagagctgcattgactaccagatttattttttaaaccagaaaatgttttaaatttataattccatatttataatgttggccacaacattatgattattccttgtctgtactttagtatttttcaccatttgtgaagaaacattaaaacaagttaaatggtagtgtgcggagtttttttttcttccttcttttaaaaatggttgtttaagactttaacaatgggaaccccttgtgagcatgctcagtatcattgtggagaaccaagagggcctcttaactgtaacaatgttcatggttgtgatgttttttttttttttttaaataaaattccaaatgtttataaagagtca

SEQ ID NO: 4 - DNA, 126733 bp, Homo sapiens
acagtctctccatctgcatccccacttcatcaccatcccaccgtctctccctcgctccactcgcgggtaaccgaggcttctccctcccaggctggttcttgggcgttcccgacccttagctacccacgatgtttcagacagtccccgacacgtcgtcttacatcaaggtaagacatggcagcgtctttaaacaggtgatgacccccagcttctaccccacccgggcctatggtcccttttccctttccccgggaaaaaggggtaggggtggaagtgggccctactctcggctcgtggatctcaagctagggcgctcctggccagatgagagtggcacagaccctcgggaatcctaggttgagaagcaacgctcctggcggctagtgtttgggaaacttggagcaggagagcctggcgaagcctgtgcaggaagaccgagcagctcgccgcgtcaggtcccaacgggtggggtgctctgagcggctggcgcacagcgtgttccctgcattaagcgcgtgcgcgcgcttgtgtgtgagcgcgtctgtgcatgtgtgcatgcgtgcgcctgtttgcatgtgggcgtgtgtatgtggggttgtgtgcgggtatgcgggcgccacgcgcttctcctacaggtgagacacgcgctcagtcctcgagcccaccttctttggccccgcccgcccttcggaagcgcagattgctatatttgacagcacatcgaagggttttggtttttttttttcttttccacaacagtttccaagaatgtaaacaaactgaagctgggacacctgggttacaagttaaatgaaaatccgctggctgggtggggcggggagtgcgcaccaggaggccctgctcatgggaggggcggtgactgggtcccctcacgccatgcagccgcgacctgacgccctccgagtagggacccaaagcttaggaccatctgagtcagtccgagagcggaggaggaaggactctccgcagtgctgcaaacacccgcatacttttcccagatctctgccccgccctccccatcctgaagccccgcctccaagtgctccccagaccggtcagtgaggcccagctgagctccctcgagtgtcgggcaaatgccagggcagtccctggccctgtgtgatgggatgcagactctcgggtcctgtccaaggattgccaattatgcgtccaaccctcctcagatctctctaaaggaaaacttgtcacacggacgcatcttcccgtgtgaagcagtcactcgtcatttcaggaagggaaggcctaatcctagaggcttggcccaaaaaggggtgtttcattgacaatgcctgagtgagtgaatgaatgaatgaaatacagtgtaattcatgtagcaataaccagtgaatggatggatagcaaaatgactcccaggaggttacagagcatactttaaggttagactaaggcgcgcacggattcgctgtccccagttttcctgagaagtttaggaagagtactcgggtactcccaccactcggagtacccgagcccggcaagaggagctctcacttctagctctgcactgaggattgtaaatggccccggggaggggagctgcagtctctctcccactcataggaaccctcgagtccatacacaccccgggacccaggacctcagggatgaggagccctagaggggcacgtgggagccccggaacccgactcaggccacgggtcagggacaaagcggaggcgaggagacggcagtctgggagctgtgggccgccagagaagctgctcgctgcaggagctcttttcaaggtggaaaaatggatttttcagcagccacaaagtttgtattgttgcacaaaggggtgcattgatggcggcgaaaggtctgcgtggcagggacaatcttgagtctgttccaccggctccctccatcgaacatttgccagaggggcacaaacagttgcaggctgccaagcccctgccgttgtccggcaggcacccggctcaggagttgttgacaaacaccgcaggcccaggcgcccaggccccatgagggaggagcccagcctggcccctaggggccaagggtgccggctccaccggggtcacgatctgaacagtggtctgggctctgaggggtcccacagagaggtaaaggaggtaattgcccacataagagcgctttaggtaggaaaggggcagggaagaacaagggaaagggagagagggaagagggtgacacttggagacactgacatgcagtagttgatggataaccgcaacgacattcatagctacctctcagatcttaccttcgccagccgctgctctaagcgttgtgtctgtattagctcatttaatattaacaacaatcttaggaggtagtccattctgcaggcgagaaactgaggcattgtgaggttaatgtgatgtgaggggcagagccaagatacatagagtaatgacaaagttgtgctggctgccaggcaagttctaaaggcttatttcgtctttacaacagccctttgagataagtcctattataaccccattgtacagatgaggacagtgaggcacagggaggttaagtaacttgttcaagccctcagagctagtaagtgtagagctagaattcaaacctaggtgcgctagtcctcaaactggaacttccgctcctgatattttgtttaaggatggaggcgtggagggaccaggagacccagtggagtaaccctgacccgcacctgcacgatgcccgcggagtgcaaagcactttctcctagcgcgcagagcatatatctgaaagcttctcgcccgtcctccgcccaacacccccgcaggactggcagggtcctcctttttttctccttgtgtaccccccaggttccttgctctaactccttcacttatcagcctgaggattgggcccaggctgcattctgagggagatgccgtcttccgcctgtcccccggacgaaaggaggttgctagccccagaatgttcacagtgacccacccctaaggtggtcttgccggcgggtctcgaagctgagtttcaagaccacggatctgttcttagaatgaatgctgtttggggcggctgggaggagggggtgtgatggagattggagaagctgaacccaccttggccccatcccaacggccccatcttggatccgccactgggcgagggtctggacacctggctggtctccacctcttgtcagcctgctctctctggtcaggattggactccctcggggtttcctcagcgacgccgcgtggtctgggggctcggagaccctcctcctccccaacccgcccgcccccggccctcccgccgccgcggcctcccacgtagcgttctgaacccgctcagcgctaaggcaagaaccagcgtggggagcgggccaggcgagcagaggctctaaatcttccttcactctgtgagtagatgaagtctgagaaacaaattcaaagcaggcgcgcctgcagagccttcctgcagaaatattccccggcattcaagcgcatccaggggcggcttgagctgccttgtttggctaaggtcagacgagactcgagttctccaataaaaataaatctcaaattaattatggcctcgagcgagaggccagacacttgaagctgcatttgtgcagtctggagttttggcgcttgcccgcccacccctccggttttctcccgccctctcctcctccccctttgccagctcggatacccgctgcggcctcgctggaccagaggggcatgggaggggaggacgaaggacggagggagaggagcggcccgagacattctgccaggcctggcatcctgcggagtttcaagtgacggagccacccctgggtctgttaccccagggaccaggctcagatcgtcaggtccgcccaccccaaacccagtctggggccgaagaagcccgggaagcccgtgtctggaaagtcttgaccgggtcaaaagggctgacattgagcgagccaagacacgtttcgacccgccgctcccctcccgggggaagcaggacttccgcatctttgaaaatactgtcaagtgcgaatggtgcgaggcaagtcgtctcaccagcgttccaaatgaaaatgctccaaatccaaatatttcctgagtattcacgcccatgtgcacggtttctgtaagtgaccccagacttggaaacatgtggtgggctgttttgttgttgggacatttttttctccagttggtagcttttgttttaaatactgggaagagcttccttggctgtgagctgcctctgacttgaaaaccagccccgagctgctggaaagtgagctgtcgccgatggcactcataccagctcctgttcagcagctctgcccagtctgggaaagggcgaggccattggagccatggtaagccaggaaagagggtgtgcacaagtgtgtgggcaggggcagccttccccaagctgggcccagagactaaggaaagaggaaggagagaagagaggagggagaggagagggaaggggaggtctgccccactaacacaagacagttttcatttgtaggccctcaccgcaggctctctatcaatttgtctcaatgcaaacattcaaaatatcccctttggctgctcgtgaaaacaatgtgagctgccaggatcaaaccatctttccagatgtctggtggtaaccacattaaacagggtagacttgtttactattgtgcttggttagggcgcttcccccatcccctttcaggatttaaaaaagcagcagtagcagtggagttgaccatcaaaccctgagttacataaaagtggggcaaactgacctacgggcatgccaacactggatggaggaaatccgagattcccgcaggcatctagtcagagttaggtggggtcttctttctgggtggagacctctgtgaatggacaggagcttctcccagggggctgaaaatcgccaacaacagtggcaccagtgccagtctgtgagtcccaaagggccggggtgcctgtgtctatgcatctagtggtgcctgtgccaggctctccactaccccccgcccatctccaaaaccatgaaattgccgtagctttggagaaacagaaagtgcgatggagttccacagttaaaaactaaagggcaagtcttcaatttaatctagttccatattgaataattccagtgggggaggcagctggtgctgaaaggaattgggggacagtataggaatgttcgggtgactactgattaatgtagtgaagatgatctgtcacttgccagaccaacaggagttggaaagagaaacctagccatggtgtctgccacagagggaccctctaaagtgctaggaggagggtggggggcagtcgccacctgtgggatgccatgaacagcctctgcaactggccagcaccaggaaggggggcctcctggtggtggagttggagtcctttctggctgaatgaggagcaatgtggctggggtgtgcgggtttctggtgaggtccgggtgggaagccgtctctccgcattctcctgaaagctctgttgtagtttgaaggtcggtagagcctgggctgaaaaggaaacaatttggggtttgaaaggatgtaattcattcttcctttcccgttaacctctttcctctctggaaagcacgtggaaacgctgaagggaggagtgagagggcaggcagcctgccgcggggaggaaagggttaagcctgatttcttttaattgaactccagaactggtggccccaggcaaagggggggactgaccccgctagcggtaaccagatgtggcggtcccaggggagccccggagcagacccctggattgagaagcagacaggagcggggggagtcagcccggcccccatcccaccatccaccccacccccacccccaacacgcacaccaagtctcaattgctggcaggctgcacccgccactccaggtctggtcacgttcagacccgtgtctgtattcgaacccaaaattggagccgaattgatgagactaatttctagagagggagggggagggagggagacgagtgagctctcgggctcaattgctcctgaagaaataaagaattaataagtcaccttttttcgcctctgtggacacccttttgaaattttttcttccaattgacttggatctcctctggattttttttccctctttcccccgtcggactcttaaataaaagtgagcaagtccaaagcgtggtccggagagcgtggacaaggtaacctgttttggatgtccgggagaagggagtccggccgaaagggcccagcccctcgaggctgctccaactggggcgcgcggcggcccaggagggaggcggggaggtctccgggttgggccggggaacgccggcctccaggctgggtagggaggacggtccagagcgcgggcctccgggtctcaccccgggaaaagtctgggtctgctctgcgctgttgcgtgctgcgctcctgggacctgctgactgtcctagagggaacgtcccgcggtagtgtcagttccctggggaccaggaagggcgactcttgcctgggagtcagtgcttgggccgtcgggtccgggtaagcgctgggggtttggctcgagaagatgcggataggtggcctagggcgccgcggatctccgccctctgcgggcaccgggagcccagggtcgaggcgcgccgccccgaggggccccttctcctaacaatgcgcccggaatggagtccgcgccctgacagcgcgggtcagcccgaaaccgcccagaatccgcttcgatgagtgggtgagccgctctgggagtctgccgcgtctcggcagcggagggcctgagtggaaaaattcttattggatgcactttttaatggttggtttgcctcggttttcgtccgagtcttccccggcagtaggcgctgggttacccgcagccctagccaactctccctccataccccccctaccccacccccaaaaagtttgtctccggctggaaaaagcattaatgaacgtatctgtgggaagaaacggaaagtgaatgagtcaggagggccaccttcggccaaccgcctcaggaaaagcaaagaagccaaaggtctttggctttggattttgggggaaggtgatggggggaggttcagacttcgggaatcagggcgcggacgctgggcgtggaccccgtcattgttcccggctagctcttatctcccaggagcaagtatcctgtgtgcgcagcgcatgaatgtgtctgggcatctccgcgtatatttatatagtgtgtgatgcgaaaagcaggaccagcaggggaggaagagggggtgtggggggggagggaagacgagggagagcagaggggagagaagagagaggagagctcgaggcgagagagagagagagagagagagagagagagagagagagagagagagagagataggacttcctccccgattcgcaaagtgaagtcacttcccaaaattagctgaaaaaaaagtttcatccggttaactgtctctttcgctccgctacaacaacaaacgtgcacaggggagtgagggcagggcgctcgcagggggcacgcagggagggcccagggcgccagggaggccgcgccgggctaatccgaaggggctgcgaggtcaggctgtaaccgggtcaatgtgtggaatattggggggctcggctgcagacttggccaaatggacgggactattaaggtaagcggcggggcaacggacgcgggcggcggggaccggccggggaggcgaagcggcgggcgggtaggtgcggggcccgcgtcccggaagacgtggcctctctcccttccctccgcgccccggcttcgcgccggctcctccggcgctcgggtggcgagtcctactcgcgggccagccggccaggcgcccgcattgagggcgaccctcccccgaaatcccagcccccaaagtggagccccggcccccctcccacctcgctgcccgccggggctgcaggaggggacggcgggaaaccgggggaccccagggtacggaacggagtcaagggcgagagacctcggggtccaccactcccaccgacacccggggctcccgtggccccagcgctaggcactgggcttcctctccgcagaggcggaacacggcgggggcgggggctgcagtcgcccgggctcgggtccctgcctggtgggccctggggtgggtaagtggcctcgttgcacgagggtaggggtgcaagtgagtgtgtcgggggatctatctgagcgggctcctccagatggaagcccctgtttacatgtcagcgctttcccttcctctcggcactcagtcgcccggctctaggcgctggagagccgccggctccgcgggactcctgggccggcctcgccgcctctccggcggggaaccttccccagcccccgtccgcacagatccctagcgccccgagcccccgcccttcgcgcctaggcgtgcgccggctccaggaccagggctcctggagctgtcgcctccgaaagggtcctgcgtccttcggagccgcctccgttgcaggggccggctgtgagcccgcgccccgcgcccgcccggccattcccaccccagccgccgccgccaagcctgggtctaggttgcaaagtgcaacccaggcggaaaggtgagggtttgggttcgcgtctcacttcagaaaagttgactgctgtctctgaaagggttcgccaagtagggccaggagcagagaggagggacaccccctaacgtgacgggccttagaggacctaggggaatgaatgggaccaggggttagcttcgaggctgccgcgcaacaccaagcgggagtctgtctggaaaaactattaggctggcgaggtggggactggcagagcccgccattccccagaacccgaaagaatcgactccctgctcagggctcagcaagagaaggctaagatgttgggctcagagaattcaagagatttttatcttctgggtggggtcgtggtttttattttctaagttttttttatgaaagtttgaaatatgctgacttaggtaaaagacaccaaccgaaggaacttgcaaatctggagatgagataactgactgtgatgggttaaagggagctataagagcctataagagcctgggttcctcaaacccaaagtgagtaggtgagaagtaggtgagaggggattcctgcaaagacccgagagtgggggtcattgggccattttatgcctgtttctctgcttcctgttgatgtgttcatgcaagtgtctctgtatttctgggtttagtaatgagatgctcccctctagaaaactccctcgccccaatcaggacagttaccacttactctgaaggcctcttctgatccagaagggtggtaagatggcctcagggtcttgatgtggacaccctaaggaaaagtgaagaaatatctccacactgcttaaactctacgcacaggccctgagcaaaaggaggaagctgtggtctgtgtacccaggatgtgctaacctctttagatacacacagggattggcatggcaggcctcgagaacaggcttagagcaggaacctgacacttcaggccaaggatgggagtgaaagtccttcctttttttgtgggtggtaggagccatgagctcctccaaaccctccctgtgagcaacctgtcattcacctaagttacctggctaggctgagtccccacagagctaccttcagtctccaagcattctgcaagattgagcctttagtgtgtgtgttggtgtttaagttgtgtgaaagccacagttttctgttcgcatgtgacctctggatcttggggtttccagatcctgttcccacaatagttcaaatactgtgcttggagaggacagtggaccaggagagaggccagcattcttctgctctcttggtgagaatgaaccgtccattaagcctgtttgagattcatagtcatcacaaaaatgaaacagtggaactaggttacctctacagtagtatctaaccaatcttctcagtgcctaaaatgtgctcatatgtgtttacaagaacacttgcctgtatgtgcactaaatccagccctacactgatcgaggttgacgacactctagagagaatctaatttgtgtacacaaatccagggtgtccatttccagtttgaactgcctggaaaaatcaggtttgagtgattctaggatgtgattttatgcacctgcatagttcttcctcaaatataagtcatgtctatatttcaaaatacctgtgggtcttggcacttaggtggtatttggtgcaggaagccagggaagtctggatttcttcacagaagccctttattttgtgcataatttgcacaactctatgtgattacaaaatcccaatcttgttgccctccttataagtccctccatattatattctcttctcttttccaagaacggctcctggaaaggctctgaccgtcacattgggagaagcaatatttgctggagccacgctactcttttgtcacagacaggttaacttgcagtattaaacaacacccgacccacgcccctgcttcccacactgatattatcagtgttaaaaagcacatgatactgtttgctgctttaagaaatgacctggtttcaaaaactgcatcttaattttaggctggcttcagttgaatccagttaattttatctatgaatgcctgactcagtgcacgtggtgtcattacagatggggagacagagaagacagacatggtgaatgaaggtgggaaatagagaatgaacagtggatttggagtcagaaagcccgggttcattctcagctctgctacctagtagctgtgtgccttatagcaaggcacttcttgtatctgtttccttatctagaaaatggggccaaagcacctccttgccacaagccataggaagaatttttaaagtctgctaccttagctggatacacattaaattaacttcatgtgccttatagcaaggcacctcttgaatctgtttccttatctagaaaatggggccaaagcacctccttgccacaagtcacaggaataatgttttaaagcctgccaccttagctggatacacattaattgaactttgcttttgggaatgggcataccaggacagattggtcagaaaattagaacacaggtccaaatttaccatcatgcatatttcattaattcaacaaatgtttatgatgcatctattatgttgcaaggctctgcactgtgtattgaggataaaacaggggtcaaaaccctccaggaatgtagacgctagtggagggagctgacacatacagagaacaatctcagttgagtggtgatatatcttctgaagaacaataacgcaggttagggaatggaaagtaatgacgctatatagccaggatggtgaggagaagcgtgtctaacaaagtcacagtcgggcagaggcactctctcgtcattaactccagaagagtacagcaccaaccacacagccagtcaacaatggacaagcacagcccgaaagaagggccagggttatggctggctctgcaaggctctggagggcaggttgtcactggcagggcagggaaacatctggacaaggtttggaagaagcagcagagtgaggaatacttgggaacagaggcttgacttctgtcctcaagaaggtgttgctgcctccctctaccacacacaccttgtaatctccatgtcacctggattcacaagaactccagacaagatggcctctgtctattgatctgtccccgtgaccacacagaattgctcccctcaggtggttaccaagtggaatcctgttttgtgtgtgaataatttccaccaaaaggcttccttccagttccactgccatccaaatttaagtttataggttggcaactttaaagctttagagagtgtttagcttgaatttctcactttatgggtggggaaactgaggtctaggttgttaaatgaattgtccaagatcatacagctaactaccaacagagtcatagtgaaagttcagggctctgcacccttaggccagtgttctttccactataccatgaaaatatcatttgcttttgttacatttttatgaattatagaatcgtggaggcagtgtgtgtatgtgtttgcgtgtgtgtgtgtgtgtgtgtgtgagagagagagagagagagagaagtctttaaaagaaaaatcataaagaatttggcactttacactaaagacacctctggtatttaatgaaaaataaataaaattgtatcactaccatcttgaattatttttatccttaaagaaaagaagaaattccaaatttttggatagaatttttatacaactgttttccaaaataagtccttcttttccagcagacaaagtaaacagtctccattacaaggagacaaccaaaaatatagtagtttactgaaatacccaggcccttctacagatcatgggcaggtagacagacggaattcttatttcagctcctttaataatggaatattggactatttaaataaaatctattagaaggcatcttatggatccatcagactgtgtcataagtaggtcttgaataacaattgcattaaaaaagatttgggattttcatgtctctttctgtttggggttaaacagttaacttggcatttgtttaaaaaacagttgatttaaaccaagcctctttctaggtatatagcattagtctaatgccagtactaagttacccccagccaaaaaaatagaaagaaagaaaagagttgggaaaatttttatattgatagtttttttgttctgtacttaaaacattccttttaagtctatattttgcttgttgttttgtaacgaattaagtaggctaagggacattgtctgttacgtacacacaaacacacacctacacacacaatctcataaaaccttcaaccagccacaatagcttttttcgtaatctcagagttatacaggtgtcttttcctctgcagaagactacaccctgtttcaatttctgttgctttaatgatttcatatctatagcgttcttcccattatgtattaattgatccatgggatgatatcattaagtgatgtcactctttgtgtattacagttctgccactgacctgatagacccaccatcagttgcctgtgcactgagatgtttccccagaggctatggatagggttatatgtccccacactatctgcagggccaatatagtgcaaatctgacaaaatttaggtaatctatggaataaacctttcctgtgcaaagctagctggccttatgggaattggtggtacctcagtctcaggggcatcataaactgaccaaccatatgaaggtgattgcatgtctgttaggcagggactaaactatgttctgtgaagatagaaccccaatggcaaaagggctctgccaggagatctagcgagaagataagccacatatgtgtgccctgcagagcacagcaagtgttaccatagccctgagaaaagaaaggatgatttgaactggagagacagacaaagacctcatgataatagttgtttatgtagtccctttcataaatctcttcacagatcatacagtccctccacagatcactggcccacacactcttgcatcccattctcacagtagccctatgggagataataccatgatgtctctacttcatatggaagaagttaaagttcagaggagtgaggtaacttgcccaagagtataactaacaggggacagatctgggtttcaagcccagtgtttctcattcctgattcctgcttttactacacacactggccacactgcctcttggcacaggtggatctaagcctggccttgaaagataggtaggtcttgcataggaaactatggtaaagggctttctaggagagtggagggtactttggggaggaaagtgtacaggtgatggagaggatgggagtggaaagactgaattgaactagactacagaggaccttacatactataacaaagaatttgggggtgagtatggtggctcatgcctgtaatcccagttctttgggagacggaaatgggtggatcacttgagcccaggaattcaagaccagactgggcaacatggagaaacctagtctctacaaaaactacaaaaattagccgggcatggtggcactcacctgtagtcccagctgctcagggagctgaggtgggaggatcacctgagccaagggaggtcaaggctacaatcagccatgagcgccactgtattccaccctagatgacaaagtgaatacctgcctcaaaataataataacttgggtcttgtaacatgtatagaaaggaggaatgaaaacttgtgactagagggatgatctacatagctgtacaagtctcttagaaacaaatccttcgtactctcttctccttaggaaatgaagatggaagtggctccatcacttatcagaggccacacaagaaatgagcagcagtcaggattagacaaccagagatagattcaggcaaccagcagtgctgtcttctgtcttcaaagacacctgttgattaaatatggcattaggggagggaggagaaactctatttcaccagatgacataaaactgtgattatccttctcatcccttccttcccaggggatttcaccatgagcaatcttttcaattgggccttctatcctgggctacaattttagttccttttgagaatgagtcagcagatagtgcttgagaggagaaaaaagaaaaaaaaaagtctctctaaaactcaaatcaaatttctgtgggccttcagacaagtctgacattcttccatgagttggctgggccgctggtctcagttaggaatactgacacttcaccccagcaaaccaaaaacgcagagactcatcaccgtcattccaagtaggatcagagatggagtgttcagacgcattttcagataattcagatcaactttacagtaccttcaaaattgctcatccctacaaaaatgaagcaaacactaatgtatttaagagatttgccatctttgggaaacaatgtgtctgccatttagtttaagatcaaaatctcagagtatgagaatttttcaaatcacctcaaagggaaggcagacttgaacactgaaatgctttcccaagagcaagccccatttacccagccagtgctatgtgtccaaggcaatgaaagatcttatgtcacatctcagtgcacacatgcaagaggctggaattacaggtgccatgggagctttaacctcgaatttctagacattgtgtgggtttcacatgtctactggaatctaacactccagtagcagaattgttaggtctgaatatatgggtattcattgatgttatgggaaaggaatcggagagtgagcaattctgcagtaccattcatgtagcaaaagtgtgaaaacaaacaggttaatattagaaaattactctgctcatgagttgttttaagttactgctgttacagtctatggaaaagcgtatgtttcaattgaaattctcatgtctacagagtcattttgtctttagacatttatgactgaattcatactcattcatgtattcaatactcattcatgtattcattcacccaaatgttgaataatattaccaggcaccaatctcaatagagcattcatgtaaatgaacaagaataaggtttctatgctatttcttccaggctttgagagagtagacatttctcttctttctgatttttagctctgagtattggaaattccaaaagaagcaatactcattggagaaatctttatttgtggcttataatcataaggatggttagacacattttcttaaaggtaacaaccagtttatattctccattgccccttcacccttggtgatataatttactgtaaggatatttttggaaggctaggtcttcagccaaggatatttcttcttctgattctccctttctcagctttagttcctctatttatatattaacatggggccaggcacggtggctcacacctgtaatcccagcattttgggaggccaaggcgggtggatcacctgaggtcaggagttcaagaccagcctggccaatatggtgaaaccctgtctttactaaaagtacaaaaattagctggtcatgctggcgcatgcttgtagtcccagctacttgggaggctgaggcagaagaattgcttgaacataggaggtggaggttgcagtgagccaagatcgtgcctctgcactccagcctgggcaacagggcgagattctgtctcaaagaaaaaaaaaaaaaacatggagaaaaataccataggtaaggtgaaaactaaatgagaaacggagaaagaatatttatcatacataaagcataaatgtcctatcatacaaagactacttacaaatcaataagaaaagacacaccacttaacagaaaataggcaaaaatgctatgaatagacaacactagaaagaaaatacaaatgggcaataaataaatgaaaagaatttcaagcacatgcataaagacattcaaataaaaataataaaattccaatgtttatgacctaggaggacagcagagactaaaacagcttaatgtctcatgttggaaagagtaaaggaaatgtcactgtcttatcctcttggtaggagtatgacttggtataatctttccacagagcaacatctatttgagaagttaactatttacacaaatttgataatgccaattctacagctatgttcactcagatatatgtacaatgtgtttattgtagcattgtttgttacagcaaaagttggaaataatctaaatgtccaccagtaggggactagataaacaaaggaggaaagattcatgtaagaaaatgccatgcaactacaaaatgggataaaatcaattgtcgtatacactgatttagaaaattctccaatgtatattattacatggaaaaaagcaaaaagttccaaaatattgggccgggcacggtggctcactcctgtaatcctagcactttgggaggccgaggctagcagataatgaggtcaagagattgagaccatcctggccaacatggtgaaactctacctctactaaaaatacaaaaattagctgggtgtggtggtgcatgcctgtagtcccagctactggggaggctgaggcaggagaatcgcttgaacccaggaggcagaagttgtggtgagccgaggttgcaacactacactccagcctgggtgacagagcgagactccgtctcaaaaaaaaaaaaaaaaaaaaacaaacgttaagagagacacagaaacagacttgtaaaaaggtgaatgggcaccaagattttatcctgaatgtgctggtcccggtgactttaagattcgaaattgaggtaaatgcagggagaaattggctggcctaggatccggagacctgagttccagccccagctctatcccaaactagctatgggatgttaggcaagtcacttcacttcctcatcattcatgttaaaggtcttctcatatataaaatgaaggtatgatttcaaaatttgctttcagctctcatgttcatttgactctgatcctagacaggctttaaaacatttcttatttgggggtgtggatgatagaacctcacgtagatgttctatctgatcctgtgtggctcttctcccataatctcagggctacattttgtactgtggagtgaccctcaaggccaggtgaaggcaggggctctcagcaggtgcttggtgagtttctccgagctggttgtttttattgccaagtgacactagaactgtgctaatccctttccgttaatgcaaactaagaatagggcctgacgccactctggggtcttagattcttttccgaaatttggtctcatttaaaacccaaaacactctttggctccaagcgtctttcccgtggcctttaaaaaaatcctgtttaattgaaaggaaattgaatttgtctggttttgattcatttacacttaactcttctaaaaacaataatttgatgtccaaggagaattttgagtctcttaatgggttttctggaaggctttgtttcttcttgttaaaacaggaagtggtgttctatgggcaaacacagtcaaccccagaaggccccaattcagtttgaaactgtatcacccaccattttgcatgggtcctcatgaccccaagctaaggcctttctttccctagtactcacctaagagaaagagatgctcatctttcatcagagggggaataaaaatgaggaagaacaatcatagttataaagagaataagttatctatccagctcaaggtgacaatatctattcaaacctttaagacatgcacttgatccctgtaacaaccctgtgatgtatgtaatatttccattttgaagagattgggtaagttactcatggtcatacaggtagaaaatagaaaagcaattattggaacctaatcctgcttacttccaaattccataaagcttagccactgtgatacatcaccagattgatacatacatctccatatagtttaggctacgagcccatctatggggaccatgtaggttttgttactatttgttttatctctttgtctaagtgaccactatccacagtctgcaccggtcagattcatgaaactgctcaattcttcacaactctttattcaagaaggcctatttcccaggtaagaaagcctgcctggctttgttagcaggtgcactggtgtgaaactgacaggttctctttttacataatgatccaatgagttgatttttaaatgttttatagctcaatagagaacggcatattctttgacctgccaaggcttcctcctctacccttgtaccttcgttctttcttcctttcctcctcgaaatcttgctctcttcttcattctattccactcatatacacacaaaactatacacaattttttttaaaaaacataacagattcaggaggttatataaaacacaaagaagggaatgttttgcgaggttaaaaggaaatcattgagtagggctgacttcaggctccagtttctcttgaatagcctttcttgttatttcaaggctgattgacttataactgcatccaaagctgcctcacaccagttccttttatcagaccaagtgagacttcctgtggactggcccagcttcctgatatatttcctttttcctttggcagaacaaagaaaaccatagctccaaggatccttgggagcaaacacaatttagccctgaagaacctattattttaaatttttcattctcaatgcgtagggccaagcgcctgcctttgctttttttttccccacagcattctgtgtaatgtcccgatgaaccctatgtgcaattaccaggggtcgatgagctacttgaattcatcctagttgtagtttgattttattcaaagtaggaaaattaagccattttcagtgcacaagcacccccacctcatacacgcatacaccttcaagagggacgtggaacacctctctacatagggtttaaccttttgttacctgagctcaacacaacaggtgtgcaaggaaaccctcttgtctagagatttcaacctatctgtttttgcagttctgactctagaaacatgcgtataggagaagaagcttcaaggtgtatccaaaggatcatcaaagtcagttgaagaagaaattccagaaattgagttgagatcgctgcttttctcttttgcctggagtgtctcccacatcactccatacaacgtggcctcactattcactctacacattactactgaaagacctttaggcatgacccagggtaacaagggagcactgttaagaaagttgcttgtttctctgtcatatctcccaaagtacctatcacacattgccaacttaggatagccccctccccagtagtctcaaaaagaaagaggccattgacggagagacaactgaggcttcaagatgtagtgtgtcaaaagatgggaaccaggcaagagcccctggaagcagaactcaagtattcatgcccccaaacaccacgctctacaatgagggtgttttctggagcaaagatatcaaggctcatttaacccacagggactcctgcttctttgttcattggtcctattttctgaccattgtcataatatttctgggtgattgaagagggcactttccataggaaccacatgggtaagtgagtaatcatgtagccacccaaattttactaaagtagatttttctctttaaaaggattgctgatttggaagagggtaaacaacaaaacaaatgtagctcttctggcaagaggcatttcttagggctaattcaacatggttaattcataatgatttttcctaacccagttctcattgttatcatgtctagttgaaaatggatttaaagaatattcacaaagaagaaaataactcagaaactatgtggcatgaggagactgtgagggggttatgggcacggttggtgtgctctgctttgtataacctgcttgggcgatagcaaaggcaaggggttaaaatgactgccccacactatgagcttaggatctttcttttcccagcacgatactctgtcaatagccctgtacccaagttcatgaacagtcaggaatcctgaagaaaagattcatacattatcttaagcaacttcccccgccctgataacactgcctgtagagaaccatgctaacctgcccttcgacttctccataataagaacacattggtcgaagggcacaagtcctctttctcaaatacggtctttggtgcaacataggacttccctagaggtgagggacttgaagggcacctgtactttttgcacttttctagaaaggagagggagaaagagcaggtgacttttctagaaacgtcatttcaggaaaccagcatgtggagacttcccagggtgccttggggaaggcatccagccctgtggctgtgctgctctgggcttctaagccattccttttggagactgtgggtctctataaacatactgagtctgaagtgtggtaaaggaattaccatggctccccctccctgccttcttggagtttgccccctgagttttgtagacaagccatgacagggcagtaggactgggtttagagctcatcagaattatttatttcttcctatcagtttggacagggtatgacccagactcttctctgcccagagcacccttttaaaaaatttaaaaccctgtgtgtatttcatgggaaatttcacatgcctgtttctgattcacttccaattaaaggctcaaaacactggttttgtaagagctctttgatgattcagattcttgttggttcatctttttttctctcctaaatgtccatagaagcttaataaatgttgttcagacatttgcatgcttaactgttgaaaataattggaaacaggaaagaatgttttgttagtgtgcacagtacaagcacacttacaagggaaggagagacacagcctcagtgaagggaaactcctgggaaaacaggggtatccctgaaggtgggtgccttggtttccccattgccgtgcatgggggaggaagctttcagctcagagctaccaaaaagggagaggagcgttacatgagacacaagaatccttcttactgtggtcagttaccatcgacaagcagtcagttgagtggtcagtctcatccaagatggaacaggtggattggcattttccatatgctaacactacttttaactcccttctgattggaaggagttggttgtctgctattagagcaagcctcgttctccacctcctttaaaaactttgctggtgaagctgtctaggtgcacctgtgcctagctcccctgagagagttttatatatcggtccctctaaagtgctaatgtgggcaccggcttgggtagtctgagttctgtacctggttttgccttaggctggcttcgtgacattggacaagttactctccccttctcagtgggtccatttacccaaaaggattaaggcttcttgatgatcctcttcttccatggatttggtaaaaaactggagtagtgagttgctttgagtttcttcaagaaaagcgtgaattaattactacactttgactaactactgggtggctcattggatggctttcttgttgccaatgtaacaagattgctgtaaatcatgcggcatttcagattccgagccttatttggactttttactaaagaaagagcacccgccccgtctttttatttgtcaggcaaagttcagtcagccaatattcagttagccaaagttaccaaatgtgacttcatgcccacacaatgtaaatataatgtgtcaatgctgtgtgctgtaaggtgcttcttgcctaaaaaaggtgagacaaaaccttaggaaggctggcagtaaacctctggagtattttgccagattactgtgacagtggcagaatgattttgtgaaagccacatgcagtctgaagtttggaaatctaggttcagacccacttattaattgtgtggtcttcggtcagataataacttctccaatctcctttcctacctgtaaaataatagtagtactggtagtaataatgcataacgttaatttttctaccaaccttactaataataagaatcaaaagtagtatggaagtaaaagcactttgtaattgtaaagtgctgtgcaactgctagttgttattatcttagttattattctcattcaagtcgatgcatgaatataacagataataaatgtaacttaaatctgttgggttgcttttttctggccttagtgatttcaaagacttgcttgcatgtggttaaattcaccagttagtgacttattcatatctctttgcccatgtagacaccatcccctacaaatgcacaagtacagatcaaacatcccatattcctcctttccctcccacgtatccggccattgttctacttgtgaaactcccatcccaatcaatggggggtttacgtaaaaaccgatggcaggatatgagtgtggcttcaggaattccaggcttgtgctgctgataaagagagttgtgtcaaacagaaaacaccagagaaacaaattctcttgtccaacctatgctacagcactcccttgtgaatagttttaaaacatccgtctggctgaccaaatacctatggctgcctccacccatacatctacgccacctcttctattatcttccccatgtccttgtggtaatacagtacagaaccaggctagaagtaggttaattcagagggagataccagtagaactgagctccctgattaagggatgtgaatttaattgggttgtgacagtctgtattaagtgtaaatgctactaataggtttaactgactttggtgtgagtgaagggacaacagaacaaaagaagtaatttgccttgaagatgatcctcttttagtgttgaagtcacaagtgatggaggcccttctttcacttaacgaggccaggaaagctgggttggtctttattctcatcatgcatcatcaatattttaggaaaggtcatattgctgtctttcacggtacactgcacaaccaagtatgattatgtgaccagaagtgaagggaaggagaacatttgcccatattctacccacactgaagtagctcaaaaatgaagagatgaagaaaggaaaatggagttgaccatttccatttaagtgctcattcagacatttagtattaaaatgatgaacttcttttgcaatctttttattgaacgcattgaactaggtattagggtgttatccttggccaacagaattgggatttcaaagttcatgaggccgaacattgaactgctcaaacactagtctgtagttcctagggaccacaatctagctaagatcagccctactgctttttctccatgacaacaaatcaccaccaagaccgagatgctgtattgaaagagcatgctgtgtttttccacactaacaccacagagtgaaggtaaagagattagagagcatctcaaatttatatttcaaattatgaagaacatctgacacaatgaaagcaaatgcagccttgcagaaaatttatttgtctatctttgtgatgttggattgtataaagggtttggacatactcattgtcctaccaccttaactacataaaaaaatataatctcttcagctactaagtttctgattttgcatttgatatgggagcaatagtattttattgggctacacaaggttccaaaatctctcttttgaagatattcatgtgtaggaaactctgtaacagatatagctcttgcacaatttttaggagaagagatttgggaaactttatcagtttttctcaacctttttaactctatcttaaagtccaaggaaagtgaaagattaagaaaactttccttatcagggctgtccaacagaactttctacaaacatggaaatgtcctgttctgcactgttcactatggtagccactgtactctctatttgagtggctattgagtatttgaaatatggctagagaaaggaaatgtaaaattgtgttcttttttcattaagtcaattaagtttaattagttgattaatctaattaattaaatatggttagaagctaccatagtgggcagtacaagactgcatcattcaagttaaaaacatcatcttgaaatctgaattcagtcagaggggcatatttacacggattattttgatctgagtcagcaatgtgttgtccacatggagactaacacttccatttattcttatgactaacattaaagcaaagcaaaatgaaaagtgaatgttcagcattatcatgttggcctggggctggagctaagttttctatcccgtctcctggcttcatcatcaattctctgctgacctttaagaatgtaatactttatttcccttttatcaaatgagggcatttggaatttatcaaaaggatagtcacgaatcatgatcgaatgtttattgggcttatcaaagaaaggtatgggctttgccctataccttttcattgaaaaataatcttggccaaaaggaatccctattatacataatggcgatttcagtttctccatttgcaaaatactggcattgtacttgcttatttttaaggtcatttttagctctaatgctttatgccaccatgaaaatatgatttcctattaggtagagctccatactattaacagatggtttgcttttctagttcccagatccctataaccgtttgtaatatttcttcttaagtataaatgtgaacaaagcactttaatttagcaaataaccagctaaagtggtagtctttgtctttttttaaaaaaattttattttaaaacttactagttagactggtagtccttgaaagccaatttctctccaatgagtattccctaggtttgtattcaacacagtttggtcgtttgtcctctccaaatctcatgttgaagtatgattcgcagtgttggaggtggggcctggtgggaggtgattagatcatggggggcagatccctggtgaaggaattagtgtcatctctgggcgagaagtgagttctggctcagttagctcgcctgagatctggttgttaaaagagtctgggacctcctccttctctctcttgctcctgctcttgctatgtgacacgctggctccccattcactttccaccacaattgtatgctttctgaggcctcatcagaagcagatgctggcaccatgctttctgtacagcctgcagaaccatgagcaccatgagccaaataaacctcttttctttataaattacctagcctcagatattccgttatagctacagaaaatggattaagctagtgctgttctatggtacactgtattagtctgttttcacattgctggtaaagatatacccgagatggggcaatttataaaagaaagaaagaggtttattggacttacagttccacatggctagggaggcttcacaatcatggcggaaggcaaggaggagaaagtcacaccttacacggatggcagcaggcaaaaagagagcttgtttaaaaaccatcagatgtcatgaaacccattcactatcatgagaacagcacaggaaagacccacccccagaattcaatcatctcccaccaggtccctcccgcaacatgtgggagttatgggagctttgggtggggacacagagccaaaacatatcatacactttccaaagatctatatccttgatatcctgagacatgaagcaatttctctctacccttcatacttctcacccatggataatagaaatatattgcctgctacacctcctgtggttttagaatcactgtgaggaataaataccccaggctttctcatggggagatctgacttcattactgaggtctcgctaatgagcagacctatagcagctttttctttggaagtcttcaggtacacatcattgcgaaggtcaatcctgtgtccatcactgaatggcataaatttgtgaggtgaactgtttaaaacaaagatgggcagactcctctcagaaaatgaggccatgttcctagaggtccaactctatgtaatggtcttaggggtgatgaagcactgtagtcctgcttctcactcatacctgccctccagaaaggataaaattataaatgtccaattagagtctttattagtctcttcctatgtagaatttatcaatagtttgacagttctgcagctcatgcattttcagaaaaatccttcttcagtttaaaacattccaccattgttttttgttgttgttttttcaaattgcattgggaagaaggtaaggagtatgtatagaatacaattctgtgaacaaagtgagtgagttacttgctccttgagggcagaaactctggccatttgtcctcaagtcctcagtgcctgacacatatccatgtattaattgagctgcttctatgtgccaggtgctggagtacagcagtaaagcagacaggtatagttcctccttggacagaggtaatagtcaaggcaaaaaaaaaaaacagttattgagcttgttgttataagtgcaaagggttctatgaaaggggaagtatggggtgcctcgggagggcacaacgtggggacctaacctagtctcagaggtcaaaggcttccttaaggaagtgacatttaggccgaaccctgaaagataagcctcggagtcagtatgaaagagaacaggccttccaataagtctttactggatgagtgaatgaatgaaatggccacccggggcattgctaaattaagtaccttgagcttagtcatcctaaccatagtccccccaggcattatctgtgtggccataagccattttcttagccactctcttcttcagtaaaggcaagtagagtgtaatgaagaatactgtgagaggacaattaccttagaaggcattatcagactaatgttttactgagtgcatagagtacatatctataggttaatatgcctttactatgcaatgcatccagaaatttcaaagtcaagaagattctaggaggctgaattccacctttagaaatctcagctatgaaagctctgggtttcaacttgatataactcttcactggccagaaaaaaaaaaaaaaaaaaaaacggcaactctttggcaaatagagctctggaagatgcgctggctggcgccgacataaactgctatcctgatctccatcaaagatgtgggccttctcatgctgcagtttcctcaactgcagaacagggagattcttccaatgataattttacctcgaagtgatgttgtaataaagatggtggtaaaagcattttgcaagaccaaaaaaagaaacacctactaaacaggcatgctgtctatatctggtgtttgttagaatttctgaggaaaccctctggtctaagattctagagagtctacagaggttgataactgggattggcttttaagatcttttctggaatggctgttccctttacctcattattactttaaacaactttggcaggagatatcagtaatgccaataacaataatgatgatgatgatgatggttactgagtagttactgatgagcccagcactgtgctaaacacttgaaggacctttttttttttttttttttgacagagtcttgctctgtcaccaggctggagtgcagtggtgtaatctcagctcacagcaacctccgcctcccaggttcaagcaattctcctgcctcagccttccgtgtagcttggactacaggcacgcaccaccacgcccagctaatttttgtatttttagtagagacggggtttcaccatgttggccggaatggtctcaatctcttgacctcgtcatccgccagcctcagcctcccaaagtgctgggatgacaggggtgagctaccgcacccggcccttgaaggcattttagcacttgacttccaccacagccccaaggaatccatctatcatgactcgcacgcacccagtgagaagaaccaagacatacgaaactcaagtgacttgccaaaagttgtgcagctagcaggttctgtctgataccaaagactttactcactgcatatgtgaaatattttgagattttcagaataagagctcagggttgctaagtgattaaacatatacaattaattattcctgccctggaagacaagagtgttaccattagcagaagtttatttttgcaattcctctggccttctggtgttcccacatgcctccaccccttttcctaacgtattgcttgcctgttgtttaaagaaaacaaaaatttattctcaaacttgtccaaatagaaatgaattgcattaaaaatagtgaaagccatggtgaaggactgaaaaagttgaggagtcaatgacatttgcagagcccctgctgtgcaacttccatgggactaccaggaccgaggctatattttattaataagatctcaatttgtaagggtcattttattatctccgtatcccccatcccacctcatttagttggatgatctagagagaaaacagcatttctaccttcttgcaatggaaacaataggctttgcttgtgccacttttattttcccactggggaatctgagagatgacctgattgaattccacccgtaaaggtcatgctttgaattcaaggcagaggaaaaaaaatgaagaaaacattttgcaatgataccccacgagtcctgagcatgctggggcctctcctggttgcattgtggtctgctgataaggataacattaatgacaagtggaacatttccaggacaaaggaaattccctgttgtattgtttaaaggaagccaccatccactaaggagagcaaggtttgtgatgtaggcacagatttccctgcaggagaggcagggagagctgccaagctgcctgtgagtatgcctgtccttaatttcatctggggaagcatttgcatggttagaagtcaataaggggtcatggcagtttatggcattggtagggttaggagccagactgttagaaatggaggcacattggctgggggagtaaaaagcctgattcatacaatgcagcccatttaggaatcatagcaaaagcaccaggagatttagagaagttgatctggttttgagtttaaattctggacctccttctctccccaccccctccaagccaaaatgtcagaaaagggcctggtttccctttatggagtgcaaaataaacagatcctcagcagcaggagaggggcccagttccccagcccataatgccagagctgggggtgggggtgctgtggggaaaagcagttattcttctgtctggttagtatttggcattgactttcattttctccaacctctgttttctagaagcctgcctgtacgggaagtacaggaataaagagaagctgatcgtgggggttttcttgccagacttcaaaggaggtggatttttgatttttgatagtttggagagctagttccaaaagtaaaagctgctttggggacttgaacctagacactgggatcttagccgtgtgcccatcagagccgctgctctgctcctgatggaatggagtgctctgggcttcccactctcctctcccagtccaggagggctggagctctgggcatctcagggtcagctgcggtgagcctggccacagggctctgcattccttctgggctttgcttggtttgagtgggtgtgaccgccagtttactctggagaaaactgagacaaagagtctaaattgggcaggatcttgaatctaatgacttgtttacagaccctgtactttttccagtgcagggaggaggaagaaggcagggcatgctcgtcactgtgggcatgggcacattgctgttttcatcctaaggaggtaggacagcttcagaaagcagcagggcatctgcctggcagccagcaggcaaagtggcatgctgtgtaattttccaaggtagggaggaagcagtggcggcttctgcttggtcctaccggcttggcttccggggcacacgctgctctggggagaatgcctgaccctgccacatgaaaggccttgcttcctcccacttcagcttcaagcgatggggagattaccctcctcacccctgctccaagtgcatcacaacccagagcacccagccaagaatgcacacctgtgatggggctaaggaggcctcactggacctgtgtaaggagagaggagattcccaggaggacctcactaatagaaaagcacacgcatgatggttttgctatcgtgtgacatttatttcatacttgctacctgtaagaaattccttgaaaacgaaatagtatatggcaagatttaaggacttgctcttccagattctggaggtccttctggagcccagggatgctgtttctaaggcatgtaggtgctgagggtctaccccaaagggcagtttgggactgcagggcaggcaggaagtgcctttgtttgtgtgcatgccaggcggtttataaacatcccctttacttcccttgccaacccaggagtatatattgcaattaccacattctgatgaggaaactgaggctcagagaagttaaatcattcactccaggccatacatctgctaaatgtgtcatgctacatccactttgcacctagtttgaacaggtttacaaagcaagtcagtaacccctgcatgcctgggtgcctgaagttgaaaaggggtggctctaagatgtggtctactacctctcctggactgttgcagttgggtgtggctgatttgaaattgtgcttcaaaagaatgagttctagtccctgaatagaggagctcacaccacagtgcactgtagatctttgtgatccagaagtcctccagatgttcccaaaaggatctctaaggtgttgctggggatgttgtgtgtatagggagtgttcccttgggggcctctgagccctcctggcagagaagcctcatagataatggcatccccagaaaactctacacttggaatgggacccaaattaaatacagcaccagcaagactaactgagccactacctggaatatgtcaagatacagcaactaacacttactttatgtttgtcatttgcaaaccctatcatgtccgttaatccattcaaatgctgagaggtaggcagggcagctattatgattcaaaaaagaggccacatctttgtggatttgggttctaatcccagctcctgccgtcactagatgtgtgtggtctgagcaaatccttccacttctcctaaccttagtttcctcatctgcaacatgagaaacttgctttccaaagtgcctcaagctatgggagtggggatacgggaatgagtctccccaacattcagaggctcccccagagctggcagcccaaggcacaccactaagtgccactgccttctcctcccctctgctggccggatactgaccaatggagaaaccaggactggggcgggaaggagtaggtggtaagattctttttcacttgtttcctgcacctggagacaacagcaagaccattatttggatgagttattgtttagagttttgtttgttttggtttgggtttttttagctttatgaaaagaaatgcctatttttcaaatttcaattgttcctttctactgcctgtccaagctcactacttttcaagaggccaatccctgggtaaatcttagtgaatagcagtcgactgtgttatttatctgtgccccatgctggaggtgcagactcggtgagaccagcagagcagctgaggttagactcagtggaaaatccagaagtgcagatgtggatccaaattgggctgaaaaaatctcatgagatcaggctttcttggacttcctgcttttagcctaagcactatgttcaacataaacgaactttcggtattttgaaacttccgtttctgatctcagaacctggaagtaaagagctgttgtgaacatttccacaaattttgtcatggttattctggaggcagagttgaaccctgtaattacggagctttgggactcactacacccacagtggcctgcctggattgcagtatgggagaggggaaggcattttggtggagagtccaggctttggagacaggcaggaccctgttcaaattctagctctgccatttccggccatgtgactggacctgtcagagtctcagtttcctcatcagttagattaaaaaaaaaaaaaacagttcgtaatgttgtgaggacaaaatggtctgcgtgtgtgtgtactctttctccccttttcccgtgtgtgtgtgtgtgtgtgtgtgtgtgtgtgtgtgtgtgtaaaatctgtaatatttatttacttatagcttgaataagttcccctgggagtctcaggctgcctgcctctgatagatgtgacattgtgaagttgctgaaatccacctaattagctgtcaaagagtgcattatacaaagacagcgagggctctgcattcagtctaagctctaaggactggcacgatctctggtggacttgaagggcaacggagacttactgcaaattttgggagctgaattacattcatcccgtctactcatgtttctggggcctcatttgctttcctgggacaagcaagggcaaggcgctgggcaggtcagtgctgtgagaaagcaaggtgctccagcagcatggagtcaccggctgaaatggacaagagctatgcagggcaaggaaaaagggaggagagggagtcagggccatgggagacaagggacatggaaaacccacccaaggctgctgagaaacaggactaagttagtaagcccatcctgcaggtgctactacttcttctctgtttcttggcttacttttttttaaaactcattacgtgcatcgtttaagttctttaaaataatgattgcagaagtgtcacttcatccttgtataaaatttaaaacgtatagaaaatttcaaaataagaatgtaaaagcacgcatagtctcacaatacagaaagcagccgattcatattttggtgcccttccttccggtctttataatgcaaatatatagacatatatgtattattttatctagccagaatcatattgctttgtaacctccttttattctctttatattaaattacggccatgttcctgtatcattaaatattacactatatcactacttctgatggaagtacagcaaaccactaaacacggaagtcaagtcctgggctctggaatagtatatattattttagttatgcccagcttctggacctgggatggcattttgtaacagacgcagccttatctcttttgtattttcataaaatcttcagtataggctctaaaaaggagcccacgtgaaatgctgaaaagacgatgtttaaaaagtcacaaagtccccctagagtcataaaaccagaaacactggggggtggggaggccaagccgggccttcgctcacctccttgtgcctcttaatgcagcccagatggaagcccgtccaagaccggattgcaggcaagcccagggcccgatctgatagcacaaagacacccacaactctgaatttcctgctaccaggaggcctctttttgcataggctgtctgatttacacatacgtggaaagcagccactaataatagaagggttgcctcttttcttccgttgtcagactccgcgggccctgctcagtgactcccgcgtctccaagcagctgcctgcctctctttctgcccctcacagcaacagggtcagccgggctccttgtaagaaagaggccaggccctctgcgccttctctgtgtgtggcggaggtggggaaggtgctttctgagggctctttgtctggcgagcaagccggacctctgtgcaacagaagccgcctctggccacccccggcccttccccctccacccagtcaagttctgcacagccagtgttttctcctccagccccagctaacctgagctctctcaactaatccagagaagcttctggagaatctgtccttgccaactaggggctggcaagttcgtgagagagaattaattctctgtgagccccttaagactagtaactatgtggagctcacccctgtaggatgcaccacagacagctggaatggtcaagcccttcagggatgccttcttctgctgccttgattcacatggtgccatccactcaatcattcattcattccgccagcctgtacttggcacctcctattctcagcacggtgtagaatatagggatggaagaatggaggcgaagacagacgaggtccctgctgtcacagaagaaacaaagaataaaaagagaagaaactagaattgaagagtctgtggtggggattgcaggggagatgcctgtcaagttataaaaggccctaatacatttttgctttatgtttgaaattgtgaccctgtccttagcctattcccaaccagcctcaagcatggttcagtctcacagtccagctgctgagctgtagagagaccatctctttatacaagatcaattatgggtgcaagagcatgcctggctcaagcacacagacccacagacccttgtggtcagggagttcctacatgaacccaaacctttgggggctgggatgtttactcttggcactctgggatttcctgtttctaagaaaatgggcctagatgctcagctacattaaccaaacaacatgttgacacaaatgaatctgaagcttgcccgctccaggctctctagaaggtcaggtttgggaatgaaggcatttgggtgactttccaaactctgaatcccaagcccagtgactcaggccaggtattaatttgagggatctgcttccctcctcttcctgcctaagaaggccccactaagtggctagagtcagaggctccctggtcatcttgagtagtgggaatgcttctcctgtctgtctgcagctggtcttagagggaggcagcccaggtagtatggtaggatgctccaaaagacccaccccgcagaaacctccatcacgtttctgtctgcctgaaatccttgccatgggttcactcctttgaacgtccaggaggttcatgtaaaaatgtaaaagttaccccctgacgtgacttaaccatatgacatttgacacacgactatatgacatttactatatggctgagcctagcaaggtcctgggaatatggaaaacctgaaacattttgacagggtatggaggagaggaaggggagaaagcagaggaaaagctgacaaggtcaagggatgcttctcggagaagggagaagggcaggaggaggatgttcaggcaaggagcagagcagcctggagatgccagtttggtgattatggacaccttggctgcttagccagaggtggccctcacaatgccattcctgctgtgcccactgcccagagtgccagcaaacactgcaggatttgcttgctcagacttcaggcaatgcagctttgtctgctggggagaatcttaccatttttaacctgtatttgaaccaagagatttgcgtgacctccacaggaaagtgcaactatcttccaaaaatgtataaattatcaaagatgtattctataacaaaaatgacagtccttgagatgtggtggattaatattgctagatcaggagctactcagatgaggtaaagtccctttgggaaagcacagagcctggggaatgagggatggaggccagtgtgcagaaaagccgtgcggaaacacctcgtgcagtcattctcctatcgagctctgggaaccgcggggtgggggagaatccaaacaatcgggaggaaaaatatccctgttctagctgttcaggctgctgtaatggagtcccataactgggtggctcatcaacagtgaatgcttatctctcacagttctggaggccaggagtctgagatcagagtgccagcatgatcgggttctagtgagggctgtcttcctcactgtgtatctgcgtggtagaaagagggcaagctagctctcttgggtcctctttattagggtactaatcccgctctgaaggctccacctccacgatcaaatcaccccctgaagatcccacctcctataccatcacattgtccgttaggatttaatgtatgagtctggggagggacacaaacactcactccataacaacatgacagctggcaccatggcacaattaaagagaagagaggagcaagtgggggctcaggcagtgtaggcgggatggaagctccctgtgggcttggactcatgtaggagggcttcatggaggaggtacattgtggtgcaggaaggcccatctccatgggtgtctacgtctccaggtgatgagtcaatgtctttgcaaacatcagaaacccaagaagcatggtgagcaggaacactatgggtaatcttaggaaatttgtgcacaaggatggagacattccagaaaaagaaataaaagaggtgcattcctgctgccatatatgtgctgagccccatgaagcagtgacatatgggaaagaaaggggaagaaggaggataggtatagaaaaaccctgcttgagattccaaaagtagatcaatgcaacccatttgttctttcattaatgtaatcatcctttattgaatacctactatcctgggcagtgtgccaaattgagaatgcaattatgcataagacatggtccctgtctttgatgaatttaagatcctctgaaggaaagaggtgtaaatgaacactcacactaaaaacaagtgctttcatggtgctaggtgcaaaacatcacaaaaacccaaccacaggagcaaccagctctactggaaagacccaacagagtcaggaacagatttatagaggaggaggaacaatggagttgattttttttttttttttttttttttttgagacggagtttcactcttgtcgctcaggctggagtatagtggcgccatctgggctcactgtaacctctgcctcccaggttcaagcaattctcctgcctcagcctcctgagtagctgggattacaggtgcccaccaccactccaggctaagttgtttgtatttttagtagagatggggtttcaccatgttgggcaggctggtctcgaactctttacctcaggtgatccacccgccttggcctcccaaagtgctgggattacaggcatgagccaccgtgcctggcctggagttgattttgaacatgactcagaatttaccagacagggtattccagggagagggaccagcacggaaagggtgtgaacatgggatggtgccaggccagtgagagtgccacggatatggggcagcaggtgaggaggcaggacacaggtgaggcctgaccccagaaagcctattgtgccaggctatagggaatttgggttttctgttgtcaatgatgggaaaatcagtgcaggtttccagaagaggatgtgacaactcacattttgttcaattgagttaaataagcacttatagagtgtctaccacatgcagaacactcactgaatcgagtatggatgatacaaagaaaaatctatcccaagccctcctgcctacactgcctgagcctcatgggaccctaaataagtttggtaaggaatgagtggtgagaaagggtgaggagaaacaagagcacacatcgtcttgatacgggatctaaatgggtgcatggttctaggagaggcacaagggtttatggaggtagagattcccagtgtcccagatttgtttcttcactctcaggtcaaagcaggccttatttaggaggcccagtcattcctcatttcccttccttggtaatatcactacgattctctctcctcccactggccaaagtgtttgattaagcctgcagagaatgatggggttcagtaagaatgccagcaaagagacggcataaaagccacccagaatggggctgacagcgtggcctcttgatagtcccccatgctctgtccagggggaggatgctaggctgagactctaggtgttctcgtagtttcgataaaaactataattgaccaccacaagtaccagtggatgtgtgagggtgaggggagagctgaagatgagtagtttgttctgatttcagtttattttgggctcttctagcctcaagtctgtgttcagctaaagatatatggctgcataggcaaagggacctgttaggtgagcctgaaggtgattcttgcataattctcagaaactcaatcaaggtcttcctgtatctcccgcttcctcccctttctcctgcctccaacctgcacatgtcagtgcatccacatgcacacacattcaagcaggacataaggcggccggccggtccacttcagatcataaccaaaagtcttggcccctcaccactcacctgtcagcctcaggcagccagggacccagcatgggaggcacacctcatgagaactaccccaatgctcaagtgcccgcaaatgcccacaaacccttaaatgtgtctaggaacctttcaccaactgaagcctgactgcaagatgaaggaaggacctttggaatgtaataaatgatttctaaaaagacatctcatcatcctttctttcattctctctccctctctctctctctctgtgtgtgtgtgtttgtgtgtgtgtgtgtgtgtctgagttgcctcagggctggtggtttcaaaactagcagctgcaaacttatgaagggaaaaaaaaacccaaaccacaaaaccccgtcttgtgaaaactgtgtgccagtctaaaagtggcagtccgtgcaggagaaaaagcctgtcaacgttcagggcagaagcaggcagtgtgagatcacagctggctcttgacagtgaggaggaattcaaatgtgtcctgggcatggggacagtaggggacaaggacaaggcagaagagaagccggaggggactgaggagtccagatcctggctggccaggggaggcctctctggaatggctccgtgcttcagctgagccctctgaaaaattcagcttcccagatgcaaatcagaccagctgctactatcacattactgagtcttcttccagaacccccgaggtccggtctcccctctccatccactcagaagcttctgaagcatgactggcagacataaatctcccccaaccgctggctcagcccccctgccctcccctgaagctgacacccacccatgctcccctgtgtaggctcacctttcagaacactcccgattacacattaagacgctgccccaacccagccccagactcctactctatggctagtttcaacctacaactcaatccaggggtgcagggggctgggggtgcaaccgggaagcccaagggaagatccacttggagagaatgagggtcctgcctggccccaaggctggacagaggaaatcctcaggtgtcatcaaagatgaagactggagaaggagagttcctggagggacactaaccagcctggctatttctcctgccaccctcccacccccctacccccacccccgcctaagctccataccaatggcctctggccagaacaaagtggatacttgagtcacttggctagatagttgggcggtgccctcttttgtataggaaaggcaggccatccataggcccacagacagagacagaggaggccaagccccagagaccacagtggaacaagtgtcttggggtgctttgcccataggtgcagcttaatgaaggacagccagaggacacggttgtaaaaacagggcagcagaaatctatgtgaatattataagtatttgaggagaagcaaagttagtgaagtgatcaaaacggaatggggttaatgacagaacgcttcaaggaggaagttaagttctgaaggaggggagggacaacggctggggcagaggggggaagaggaagtgtgttctgcaggggagggtgctgtgtctttgggaagggcaatactgattgcatggtggccctgggagctgtgccactcttgaaggtcctgcctggcgttaatatttggatatattttcaaagagggagaatcctcttctgtattagtaataggcatgtccgtagttgaaagaatgtagattttggaaggagcacacttcagaatcagatctgagttgagatcttagctctgccacttataagctgggtaacctcccaagcctcaccttcctgaactataaaatgaggaaattatttcataaggctatggtgagaatgaaacgagataacttacgcaaagtccttagttccatacctggcaaacagtagctcctaaatcaataatggctagtattatgtatatactttatagcttatggattagaaaaccagcgatagcaagccactttaagtcctcaagaggaagagtgtaaggagttgggtggtctagatgctgatctcagcaagtcaggccctgtttcaacctttccgtgagatgcaggcagccaggacctggacagagcccaagggccaggtctagagtagtggttgcggaaagggctgatgtatcagcttcaaaggctgacttgctgcagcccaagaccttggtacatagatttaagtcccatctgattgagaaggaggtgcattcagccacatgtgttcataaacacttaacaactggctctccaggtttgtgtaatttgcacttatttcatgatgcccagcttcaagctcccactgggcatgcagttgagaagagatgcgtgcaactggctctcaggaacctcatgagccagttccagcacaccactgcatccagccaccctgtcccacaaccacagcccatctcagagcaaaagaggcacctgtcctctatgtctgacctagctttgtctaagtggagaggtaaggagttaaagcggggagaagagcaggcattcctgctctcttctctgtcccacaccggccagaagtaaagcttccctccctgacccacttcccctcaggccagttccatactgactagcaagttcattttcctcacaagctgaaacaaaacaaaacacaaaacgtggccctctcccttgggccttcagcagagtagctccgctttaagaggaatcacagggtgcagccccaaatgccatggagtctgatagtgcagcaggccgggggctaacgctgtctccacccagctcaccacgcaggtggagcggccaggacatgggcatgccttggcctaggcagtgcacttccggattccctttgggaggcagcagggagggtctggcctcatccttaatgaactatctggcagaggctgtcacagaaccatgggacgccagagccaaaaagagcttagtaatcacctgtgtgtccctttgctgcgcaatgagggtgctgcggcagaggccgcacctcttagctgtgtcacctctggagctggaccgccctctctggcctgctgctggtggtgctcctgcgtgttgacgcttggacactttttgaacaacatttcttccataactgcagtggcccctgtgagtaaaatctccctgaggcaggttctatgccttctcttgtccattccccttgggcacccagtatgccctgagtgtccttgtgaccagagccactcctgttttgcagtaagggaagccaaacaaggagcagagtcaaggcaaacgttccagtgcgttctgtattgggattcttcccttcaggcacagaaattctcatttgcactccccatttgccctggtgggcatcccagctgtacctgagtatcaggtaaacctgccttggctacatcaagtccagggatatgatgaaccatctagaactaaccacattcaattagtcccctagccaagggtggggtgaaggaaatgagaggaacctacaactttttgcaacctctactccaaccgccagagacacacccttctgcctgatgttctttgactcaaggagttgagaaccactttgggtctacacagatatgacacagctacccgtgtctgcctcggtttagaaagagctggctgagctcctgcgtgaatcctaaagacaggacggtcatttgagtttcagctgcagggattcttctgctaggcacctctgctttgtaatcggatgtgtacgagggcaacacaaaggactcccagcccggctctgccaagagactttgttgtgctccatggttcaaagaaaaaaggtagggggagagattaatggagcgagaggaggcaagcttattatatttatcaaccatgttcgcatttcaagtgccctgatttatctcacaggtgggagggaagaactgctggcaacccttctctcagggctgtgagttttggaacaggatttcctctgcaagttgtcaaagatcagataaaagtcttaatctcaggcacacacagccacaggctttggcctctgccactgtgtgttcagctttcagtgatgagactgaacaatggttggcgatgctttgcatttaaagaggtgggaaaagaaaaggatcagagtggaggtatgtgaggcatatggcactgcccgggggaaacacgagtgcaccaagcaggctccagaatgaactcaggactcaggacaactgaggtccccttttgctccctttggtgtccttttaccagtcgtcatgtacactaaatcaatgcacatacctgtcacccctttttaaaaggatggcaaccagatcattcacctctccttccccattccaagagcccggttcttgagaaccaggctggaagagcatgtcccaggtactggctggtgggactgtggagatgggaagcattttgaccttgttctccagaatgatttttgctaaagagatgcttattttttcaaaatgcaattctataactttaatgccttttcagaacagaagaactgcaccttttaggcaccatgttgattaagtggccctgtgttagggagtgctctgaggaaactatgttgatctggcatttgaccttgaaacatttctaatatcagaacacaaagttcattcatgttgccagagctagccaactgagttagcaagggaagtttcaggaaacagaaaagtcgaaaatcttgaaatctggattctttctgttctcaagtcccactctgatttgtatattatcaccaccttgactatgcctaccttgtattgtgcatttgttaagtgtgtactgtgttaaaaactttacttatatcctctcattccatcctcacaaccctattttacagatgaaaactggaatctcaaagaggtttcctaattggctgaggtcacccagactgcgggtgtaggccacacgtttacgctcacctttgtgggtcagcctctcagtagctgcgctgctcatcctattcatttctgtgcttactcaatagggagaagagctgggtaaggagcaaatcggtgctactaaagtcaggctcagtatcaagaacatgcattctattctagaatgctgataaatacactggcagtcccagaaagtcacttccaaagcagtaaagaagggctctggaacagacacatgttttcatttctttttgaaggcttccctttgagaacaaaggtggtctgtggtgctgggcccttcaagccctgacacccactccttttgtctctgcctcttgggatcttgggagagctacaccaagggctgcgtgatggatacaccacgaaggggtgtatttatttatttgccagggaaatgtattagggagaagcaaagactaattaatgattttcaagggaaactcaatctatggaatgaatggttttcccaatgggctgtatttagaggctcacagaaatcctgcatgcttccattgccgtttcccatcctttcttagcctttgctgaatgtgtccggaaatcttttgcaaaagaaaaggcaccagtctgtttgccttgaaaatgaagaaaccaaaaggtgtaacatccttcttccttctcaggtggagtagttaattttacaagtgcttcgagaggtcctgaggaaaaggcacatgccatcatgtcctctccccgtgaaagaagttcataataatctgtgcaaaacagcacctttggataagttcaatgtggctatatatagacgcttggccgtttcctgttgctcttgcagcttgcacaggtttgaaggtagggtgaggctgtgaccataagccacacggtgacatgtacattagccatgccctctgcttcctgtgctgcttatgacctgggctggactaaccccagcactgctcaggggcagggagcccttaggacctaaatgtgggggggttggtgagtttgctctcatcttctctgagcacaggttgcctggctgcagatagatggtgcaaaacacaccagcgagccagtgtgcttgtctaacggtctgctcgtgtaacttttgcaccacaaaacaagaggtcaagtatgaaagggtggttaacaaattgagcagcccttttttttttctgttaaaggggccgtgtcagaaaaaacaaacaaaaaacaaaaacaaaacaaaaaacaaaaataaaacaaaaaacaaacaaaaaaacccttcctgagtgaacttgcatgaaaaatcatttggcaaaacccaaagttcatagccatgtgctgaaaagccatcatgctagaaacggtcatcgtgatttgacctcagaaccgtctcctattttaagatttcaaaatgcttaagtagatggggcgcagcggctcaggcctgtaatccagcactttgggaggcggaggcgggcaaatcacttgaggtcaggagttcgagatcagcctggccaacatggcaaaaccttgtctctaataaaaatacaaaaattagcttagtgtggtggcacacgcctgtaattccagccacttcggaggctgaggcaggagaatcacttcgaaccgggaggcggaggttgcagtgagccgagatcgtgccactgtgctccaggctggtggacagagcgagactccatctcaaaaaaaaaaagaaaagaaaagaaaagaaacaaaaattgcttaactagacatgtcatgcaattttggagaagagatgagtggtaaatgtgactccagctttactaaacagtgaaataaattaaggcaccaaagcatgctgagccttgtctaaaatcctatagcagaagaggccagaaaaaaattcactggttcccttctttctccatccattcagccaatcagtaccagattattctccagctatcttccccccttctcatctaggacatctaaggtagaaccgtgcatcttaaaaaagcttttcaggaaattctgatgggcagacagaaccaacgtgagtctatgtcattttgactctcatgttctatatgggctgctaaataaaaactttgaaagtctttcatgtgacaaatagttttggagtgcatactctgccaggcattgtgctaagtccttggggacacaggtgaacaaaacagaggaagaccctgcctccattgagtgtagtccaatgggagagcgacacaaatcacacttttgcataggtgaatatctaattatacatgtggtaggtattatgaagaaaaactagagtgctctgagaaagacgttaaggccggatagatacaagcctgggattggagaagtcaaggaaagccccacttttttacatgacatttacacaaaaatgattaagatgagaggaatatgcttcgttgcttccaacacataaccaaagcaagttatgattctaaaaaaccaactagttaccaaaaaagaaagaaaaaagtaaatgatctcttgggcttgacatgcccttgttttgcccagagaagcacacttccttttacaattgtttgggaggtttgtggcagagaaagagaggaaaaatcagatctagagaagtagagtccttcagcgacttgcaatagtggctcttactaaagcatctcattgcttctcaaatgtgtccaagggatgctcaaagctgctttctcaaaacaggattctgtgttcaactgagtgtgggaaattcaaaggaacttaaacaagtctctttgcatcaggacttatcagagccttgaatatactaatggagatcctgaagctccaagggaaagggccgcacaatgcagtctgcagcgttttccaatcaaatttgattgcaagaggtttttttttttcactgagtacctaactcagtggctctgaaacttacatctgcacaaaattcccttggggagtgtaaagaatgctgattcctcggctccagctccagagattctaattcactggatctggaatggtcccgggaatcttcatttttaacaacacttcaagtgattttgaggcagcaagtccaggatccacactaggagaaaaactagtaggattagtgtcctgctggtgtcccggaagcatctcagtagctctacacactccgccattcaagctttctcagcttcccctcactctttagaacctggctgatgctgagtgaacacggtcaagttagtgggccagagtagataaaaataatggaaacatgcaaagtgagtcacagacagcaaatccaaccattgcctagaatttgttgggtgtcacaggtcaagctacaaagatcacattcgccatttggactcagttggcaggaatgttatgcatgtgtgatataagatgctgtgcgctgaaagtccctgaagctgtgcaaatactggatccagcagaagttttctctgttgtgcccatctgcctttgtctaattagccaagggtcactttggctgcctcccttcctttcacatggagcaaaggtacccagagaggcacatgttgatgcattcatatgcaaagaagttcttgtctttctctctctcaagtcattgttcagtgaggagtcagctcccacatgctcctcctatctgggctgcaatcagcacagtgaggagaggagcgacagagcacatgattatgaccggggcttgctgctgagctgcaggggttcagagtactgctacctgtgcaatggcagcttccccagagcgcccaggggctccgaggccacagacagaaaatatctttgctaccacgtgctgaaaaatatccccaaaaccatttgccaaagatttgacttggttaaaagcgaggtggagaggggtggttaaacaggggaagctatagaaaggaaaatgcgagaaaaagatgttttgcatattaaacagccctgctttgtcctccaattcagccaaaacgtttggaggaggctgcgctgtccacgtccacagtgctctgaacgtgcctcatctgatcttggaagctaagcaggatcgagctgagtactcagatggaagaaggctattctcgtgcgtgtgcagagaccaagatcatagggaaaagcatgtctaaggttgggttttgtgtacaaatattgtataggaacataattcaacctgtttaaaacaggaggatgattgtggctgaaaccacggtgggaggaaggaacatgttacatttcttcaaagataactgcagatcgaatgccttcatccttgtgacccgcgctgcctgcactgtggtgtgttttgcttggtttgcaccaatgccctggctggcggtcacttgctcttggtggccagtttcatttcctggttttgagaaaatgtcagggaggcctgttgcttgggcatactgtcactgagggaagtgtgcagttttaaaatgtcaaagccagcaggctcatgtccagtgcatgccatcaatcagcaaatgtccctggacccctaatgagcccactgaaagttcaaacggtaaataacgaacagataaagatcttgccctaaaatcgcctaccatctaaccaaaggggcaagatcaaaagggaaagaaaaatagtatcaatatggaaaaataaatgtactaattgctgtagtgtttgtgggcaaagaatgcagctgagaaagtgcagcctcgtggaaagggccccacggaagggagtccagagggttggcctcacactcttccccttcccgctttatgaccacgaacgtagtccttcagaacctttgtttcttcatcagcaaagtgggggaggggaataatcctgccttcttctccagtttattagagtaattaaataagattatagatgtgggaaggctcctattaagatcaatgtcttaaactataaaataatctacaattttccttgtcattattattactgataacaacaaaatgaggggaaataagtctagaaaatgcatcatctgcctgttccattaaaaagagacagaggcagagatggagctggacacaagaattcaaccagcctaggactttgttctggcacctcagtgtatatttaaagtcctgtataataacatagaagtaatcatggttatcgcttatttgtattgatggatttaaggtgggctttttatttctaaggtttggatacatctaagaaaatagcatacttcctaagataccatttgattttaattttcagagagctgatcaccaatttgggagaactttgtgactgtatgtttggtataattcctttagagatcaatttgatgatggagaaataatcctcacattatccacattatcagatgtctagataagataggaaaggtaactttatcacagctgtgtgacccatgatggcctaggtagctgagtgaaccagaagtctgaacttggaaactaagttgtaaagttcttatgaacttcctagggcttcctgagcctccccccacctttagatgccaagtctctttgcaaattcatatcattcctgcaaacagaaaatagtatttagaataataagatgtttttcaaattttccttcaagggtcctatgagctggcctgataaattgtttaactttgaagggaattttgaacaaataggacaagacaatcgaaacacgtatctagaattaggacatggttgatcccgaagttcttaaatactgaaacctccttgtggtatgcagaggccaaattgatcatctttaggcagagattccttagacatgatcgatgaggctatccatctagcgtaacactgagactttcttgtgtaaacccctcacacccactaaacaggaaatgcaagctactagagctgaacattcaaccaccccctaagtccccaccctccacccccgcccagcataagaacattattctttgctttcctttccgaagagctgtaggcattcattcatatatgcagagcaatcagacatcattagacaaagaacacctgataataattctcacattttggaatcttaagaaacttccaatgaaaggggtgatacgagttggtaagccacagcttttggcggtagcatgagccctctggcttctgaaaccctagaggccacagataagatacactcttgtagcaggcttgtcatacttgaaattctaactggtagcttgatatcctgagttgctttctcacttgagcaactttggttgagaatgtaggaacctggaaagatttcttgagacatgctcattttagacacacccagaaacatgccaggtacagatgacaatttccactataggtaaaacatctcaaaacagaagcctaagctgacagtggaccaataactgcattgtttattggtttcccaaggcaaatgttcagcaaattctgtatatataatcaacagaaaattttgttcagattctagaaaagatagctgctgttttgtatatgtgtgtactttctgctatagtagtatttgcataagttaaatattttcagtgcaatttttattagttttcaaaatgcacttttgtgggtatctgtgtgtatgcaggtgtgtggggagaaccatgaacaagacaaagaccccttgtcactgagggcagagcctgactcagcatcccaatacagcccctggtttgcattcttcccaaaggaggcacattctaacaaacaaacaaccatgccaagcctccgaccacaaacccaaccaaacattttcaaaaagatgtatatatttctgtgaaagaatatggatatctttcagtgctcaagaggcagtattctgcagtagatctaactcaagtggatagggacttcggaaagccctttttcaaactgagtttgttgaatccagctagctacatggaagggatggcagggctcagtgggagcaggacacagtaggggaggccagggtgcaagctcatccactccctcatctgtaaaatgggttagttccctgaccacctcaccacactattgtcaggcctccttcactgggagctgaaaaagacaaacgctgaagcagaaaggagggtttttacaaacaaggcttgaatgatagacacatatggggcatgcgtctcccatcacagcccccaccacaccggaacacgagctctgttcaacatggtcctcctctctaatgtctatgagttctagaacttgaacaaatctttgtcaagaatgtagtccagctctgtctccaaaccatgaactcatctgtgaacaagacatttctattttcctttatctttaaaaatttattttaaatgaaataaatgatgcatgaatgtattctgtagaaaatttaaatagagatcgaggaaaagccctcttgcctcagggtaccccataatctcacttcccatcctagaaatggccatccagggcttattgaggtacctaagatagcttatgtgaatgatgtcacttttagccttaggaaatgttcttttgggctcagttccagttacttttgttgtgaggttcttgtggaaggttcactttctatctacctgcagacaaatgctcggagcttatgatatataacatcaagggcttgcttggctgtcagaagtaggattgcttaatcaaaacctgtgtggaaatagcctgttatctctatggacttaaatggtcatcagcagttccccaaattcaagactcccatgacaataccattgagttctgaagctggaagggatcaacaagacgaggttctaccattgtttgagccttaacaagtcatggcaaggttttaccttaatattgtcattattacagtataattttagaagaatgagtttataggggagcaaacattctccatgctccccttaacgtcaccctgctctcctgacttaagtgccatccgccttattttatagaagaaaatactgaaactcaagacccgctacctgggcaggggaggagcagagaccagaaccctggacctctggctccatgctgtttctactctacactccatcttccacatctgctttttgctaatatcccatagctaagaaataagatataaacaatgccttgaaatacaagacaaccaaggcctcacctttctctcattactcaaatgatgcaaagcccgaagccctctccacctgacttcatccactaccgcctgagctctccaaatgcttccaggtgggacacccaagttcaaggcccctttgattcctggttatcttctagctgctgagcctctgcattgtatagcgtgaacagagcccagctttgcagccagaaagatctggcttttactcctggcaccccacttcaagctgtgtgacattggacaaatcacatatcctagctcaggcgcagtttctttacctgtgaaccgtctgtcccacctaccttaaagagttgccatgagggccagacaatgcaatgactaagagcgctttggaaaggagaatgctggatgcaggtgtcgtcgttattagtgtccagcccatcctttttatgtgcagctctgtgaagacatcttcccttgatgtcagaaccaaaaaacccaagcaaagcaaagacccagggctacatttctgctctggagtctcttgtatgacagtatctatgttgggcttttcagtgtgtaaaccgaaacaaaacaaaacaaaaaagaagaaaaatcagcagcaaatactgcttggttttgcattttcccttctgttttctgattagagtctctatggcttatgagtgcagagagaacctcaaaagatcatgtttgctgcggataagcaccaaactcgatgtttatcagcacttatctcctgcaaactcactctctggaggcttcaaaggctgagggagatctcttagccttgctctgaggagacaggcaggcactcctccccggggcttcagctgcaggtgtggcccaatagcacttgctccattcttaggaacgtggttctcttgctcttccccatgcaaaaaaaggaagcagcaggtttactgaaggtatggggatgagctgtggggtagagggagcaggagaagaaaacaagtattttaaaacaagcccggaaaggctgagaaagtaggtagagagggaaagggaaaggcacactccttacgctcctgctgcccccacccctcaacccccctgccccacccatctcagtctttaatctgccaaacaagcccgtgagccttcaaaaggcattttaattcacttcatctgctcccagctcaccttccctacctcctttgggtctgcccactactctccattcccaaggattgttggctgagagtgggacagtgggagggagggaggcagtggtgtgggcagggggagccagcattttattaggctgttgaatttgatttattaggggggaaaaatccttcgcttgcttgccacacaggttattctcaaagtgaaaactctattttacttcgaaaaaaaaatggtgaaagtgcctacagttatgaatggagctctttgttaccttccagatcgacaagacagactgtttggttcatgtctgtgcaccagcaaaggagtgtgggggcctgggagacagatgtggccttaattgcatggaaatattagaagatcgttaaggcattttgacaggattttcctctagctgtgggagcaaagggccacgtctgagccgcatcaggcctggccagagccactggcaaggtctctcatccccacgtgtgagggacacatgggccttggttcacgtgccctaatattggtagggaatagatgtctccttgtcaccaacttccaccccacatctctgccccataagcgcagaaagcaatctcccaagaaaccctaaggcctgtagcgggagttggaagagaagctacctagtgaaataaatatttgggaatgtatacgcacaagtacatggacagagagagatcagaccatctccaacctgaaaggtgcactccataaggctctccagggacccacacgggcctgaaagaggaaatgttgtcacgacaaattatggtgtctaaagacaaaaccttttctatctattcacttcttccctttcaaagtaacatttggttacagaagtcatgacccatgagagtcctgtaattaagtcagagaaatccttaaacactgttggctcgccaaagaacgagaccccataaatatggtcaaccttgtttctcctaggctggcctaatcatggttccaacatacttttagctccccactttttcccccacttgccctggttcattttctgcatgctcagagaatgcaaatattttcacattagcttaaattaaaaataagtaggagggttagtctgctgggagggagggagaagccccgcccaaactacagttcagtaatccctttgggttatgacagcaatgttttagatcagctcttcctcacttagatcagacaatgttggcagtcagaccaggagtagattagtattatagggtcctcccttcagaggggtacacccctacagctcagaggccacttcttagagttggggtggtaggtggttgcttagatgatgtttgggcctcagcctggtgctaatggggatggggactaggtgaacagaaaggaaggctggtggagagatgaggaaggagagaaggtgcagccacagagatcccgttctcatgccaacgttgttgttaacccagagggaaaaagggaagagctcccaggcacgttggcacgccagcatccccaggctgggtttgacatttaaggagcaccagcaatgagttaaggggctaaaggcccacagtctgcaagctctggtttaaaatacagtcactcagccaggcatggtggctcatgcttataatcccagcactttgggaggctgaggcgggcggatcacttgaggtcaggagttggagaccaggctggcaaacataacgaaaccctgtctctactaaaatacaaaaattagccaggtgtggtcatgggcgcctgtaatcccatctactcgggaggctgaggcaggagaatcgcttgaacccgggaggcagaggttccattgagctgagatcgtgccagtgcactccagcctgggcagcagagtgagactccgtctcaaaagtaataaataaataaataaaataagacacagtcattctgcctacggtgactcttcaggccagagcccccagccagtccggatgcaggggcaacttactgtggactctctctcccgcctttccagaggactccagatctaatgggtgtttcaggaccctgcagtgagagccacaacaatggagaaagtgccacagtcaagcctttgtgtccccttctccttcttgctgtgtgatctgcagaggaggggataaaaggctcatctgaggtcctggctggctctctgtgaccagaaagtccctgagccaatgaagtgttaatgcctttgcccctccccccgattcctgctcagttcacggctttcctgtcctctgaaatcccttccttggtagccagttgcaccacctctttacttcaagttctgccaccttctcctgaggcaatggctcccttgcttggttggtttctgggatgctgagtgggggaggctggggaagcttgtgcctggactgtctcgggagctcccagtgacggtgacaatgcactgcttccatttgtaaatgccatgtgctttccagaatgcttttgaggaccttattgttatttcatctaagcttcaaacatagcatcgttcctaccatatttaattcagactcttttctcctttcctgtcgtcacttccccatctgtgtgcacagcctgtgtttacacagcaggtttgccgcagctactcacttgtccagggttaccatgcatattcccataataatctgcgtttcacccatttagctcactgtagaaacttagccagttccatggaggaaaagtcccacaattctcctaatctcatagtcatcaacaacgccattaaaatgatggcatcatttttccatagacatattcctggcttttatcaacagtgcccagcacatagaagatatccaataaatatttgctaaattaatgaatgcatcagtgaatgagtgttcttttgtgtgacaaatctgttttatggccccattgtgagacaagacatgttaaagaaatatccagagtgacctttgcatgtttcgaggagcacatagtctggtcaccaaacacaagtgtccacagcctgtgctctccaagatggtaaccactcataacatgtggctttttaaattcaaatgaactaaagttgactaaaattaaaaattcagttcctcagtcacaccagacacatttcaagtcctcaatagcctcacaaggcgagttgcttctgcattgcatggtgcagattttagaacagtgccagcgtcacagtcatctcccctggaccaaatcagagaattcaacttctttctatggaaatgaataagaagtttaggtaaaggtttttgtttcttgatcctgattttattttaagattgatgctgacgagtatgcatttgttggttttacgtggaatcgtcagcacattttacaggccattcaggctgatgttatacctgagagcatttctggttcatgattaaaagaagcaagaggaccacaaggttccccatggacattttgctctcacagtttcccaagagagaaaggtttgagaaggttggcttcactggcttcattgactttgggtttctcatgaacatcaccaacctataatgaacatgggagatctcaatcacacagaaaaccaggtggaagtagcagtgcgagaactgggagccatctggacatggtggctcatgcccgtaatcctatcactttgggaggccaaggcaagaggaccacctgaagcaaggagttcaagaccagcctaggcaacatagtaagaccctgtctctacaaaaaataaagaataaaaaaataaattagctggcatggtggtgtgtgcctgtagtctcagctacttggtacttaggaggctgaggtaggaggattccttgggcccaaaagtttgaggctgcagtgagccgtgatcatgccactgcacttcagcctgggcaacatggcaagaccatgtctctaaaaaaaaaaaaaaaaaaaaagaacttgaccacttggcaggctttgacaatggatcctgaggaaaatggaactgaacgggacaaaggagctcagaaatttttgaggcggtttgggacatctcagggcatgtccacctggtaggttaattatccatttcccacaagtttttataatgtggagattgagcctccctgccctgaagacacatgtccttgagacagacagacaggcatggctctgttgggcaaggttggcacctccagaagcttccaagaatagaacactaactgtcccttatggagtaactaaaccagtcccaagcccccaggaactgtccgtgggttttagctgggttttctgctcagctagctttactgagcttgacaaagaaaacatctccaggtaaacccaatgaaatgttttctttggaggaccacagcaggacttgttcacaaaatatctacttttcctgtagatggatgccgggagacaggagacccctgtgctggactgtccaggcttagcactccagtcaagcaggatgtaggccagccctgtcagtgactgtctccagggtagctgccaatggagggaccagctgtgcaccagagagggagtctgagctctgtgatgagaggatgcttggctcctcgtgtagagaccaggctgtcctcagttcccctgattccctttagaagggagagcaaagatgacaatcaatggggccatgaagctcatgaacactgagttatctgagcttactcgtagacagagtggccatataatgcatcaacaaaagtgggataattttgagcgggataagcatttcctggaacaacagcataaagcggaactgttccaggtaaaggggctgtagaatcactccactaatagattttagggttgaagacctggaagggatcttacggatcatgtagctcagtccttttatgtagtaggtaaagaaataagcccagagagataaagtgccttttctgtactataatttgtgaattataataagatgattacatttagggagggcttactatgtgataggcatgagttagaacactattattatcgctagttttccaaaaaggaaactgaggcatggagagattaaagaacttgtccaaggtcacaagactggcaagtggtagatgtagaattcagatcctgacagtctggctctgcgggtaacatgtcaaagatgacagactgtacctctcacaaaccagcagaatggagagccccctcaaccctcacatcaaaaccctgtgggtgctgtcattgtgcccattttatggataaggggagaaccaattcactcagctagtaagtggcaatcatgtctacagaaaagcacaaagaaaattatcgtggggaattctcaatctagtaggagagatagaacataaactatgaaaaacaacaatggaaggcaatggttaaataaatataaaagcaacatgacaaggcagtctaagataaagtgccaaattggtgccaacagacttcagcagaatggaggttcttatgctgggctggagtgagcagggagacttcctggaggaggcagaatgtgaggtgttcaacagtttggtgaatgaatgagatatgattaggcagagaagacagggaggcaattctatgcaggtgaagctgcatatgtatattaaatgtacattaaatatgcctccaaaggttaagagtgcaggcgagaaagaggtgggggagtcttacataacaagaagaaaaactatttgaaataggaccttaaaatgcaggaggttgagcaagaaagagaaggcatgggagcacagggcagaacaattgaaggtgacagagggaaaatgaacagagaacacaaaaggaaaggaggagcagaatgaaatagagcacaggaactgcgcagagacggccctggctgccgagctctcccagaaaatggacctccccaggccccacctccctccatcactcccatccacaaggtttctgccacatgtcacagcaacaatatggtaaccatatgccccgagccacaaaagaactaaacaccttggacagagcagttcacccagatgtgctagttggaaatactgcaccctcaggacctgcttcctgacttgatgggcctgaggtcaccaagcatggctcagccgtgaatcacggaaaagaagcggccattaagagctggaaaacggattcagggtctcccctgtccccatgccctgagaggaaacgaaataaaatggatgcacgcctcatctgtgcgtcgagttgaagcggcattcttttctggctgctgccagtcacacaaagcgtcccggcttgtgtgcgtgaggcaggacgtccttgcttcgcaaggctgattttgccttcgtccccctgccaggctgctctctgggtgttgctggaagggagtgaagcccccccatatgcatgtttcctcgtgggctccctgtgattgtaagggccccggttaccatggcaactgccacgtgaggaaattgtcggataagatcatagcttctaggaataggacctcaagtggttgtttggggaaagtggtcagtggcttcatgtttaaatttgaacaagaaacagtcactgggtgtggctgctttaaaagaaaattaggcaagccttgggggaaggcttcatcaaaattactcaaagcgcaaagatagaaggggtagtctggctggtgtggaggtgtgggcaggcagggagggtttgcatttcccatcgggcgctgaggtttttatttaacttaattcattgcacacttcttaggtgccaggaagtgtgccaacaactggggatgaaaaccaggaatcagactgatgaggttcttctcttcagggtgcctaactagaatttgtcctcgagaaaaagaataggaaagttcccatgaccccaggaatcgaagagacaaccaagggcacatgccatccacactctttcctctcctcaaggcttagaaaaactgcagaacctgccgcctccacccctggtggacaagcctctgcttcccctgtgggagcccatcctttaggatctgaatgttctgactcccaccttccctttgtcacgcagagtcctctcttgtccctgcagacccagattgagatcctcttggtctagctgccaggtcagacccataaagaccaggcctcaagggacattcttagaagcctctttctcaagcaataggaaagctccggaactccatcctggctcccaggctactatttcaaccctgcagtgggtgaaattcactccacgaggaagcactgcagtcactccccacggaagcttttcttccaaactttcagctcttggtggtcagggaagtctgaccatttatcatcatcggaaagcatgaaactttcagtaaaggatggttaaaaatgtccaggagctgggagattaagtaacttgcccaaagttgcacagccaataaagctccacattgacccagctggtggccagtgccttttgttagaacagatttaaagcagctgtccatgaagggaagcaagcagtgtggtgattggctgccttttgaccccatctgcagccaggatggccagggctcctctgcaggaagaggctgctcccagtgtggtccagatcttcacccatcctcaggcggcaccatcactgggatcaggaaaccattccccaggtcagggacaacattcacatcatgacaatctgtaaggcgcgggctgcaagacagcagcccattgtcttgaagcagggttctggaggagacacggtgcccatcacctgccctttctttgtcccagagcagaggagggaaatgacgaatctcagcgcagcagcactttatccacctgtgtggctgtgctgcagtatttttcatgacgggtacagccactccagtgacatctggcggaatagagtcccagggaaaagtatgtgggacagcacttgtgctggtgcatccaggtggccttcccagaagcagccctccctgcaggttctcccatgccatgtgggttttgtcgtggtggttgctgcttccatttttatcatcccacctttgctccagtgaggcctgtatttaatacttcctacccatccggctaggtgggagaatactggctccgtcttacagaagagaacatctaagctgcttaatggtagtaagtctcaacatctcagtctggctttgctttgcgctgtccctttgatactgtgggacctactttaatggtcaggccaccccctactttattctctgagaggagcttcgtcccggacggtcaagtgtgaagaattacacccagtagagcattgccgacccttttgtggttcccactgccatctagaaaaagccactggacagtggacagacccagtgtaaagaaacagaaagtaaaacacactgtaaaatgttctcttcgtggggttcagatgaatgttctatctcccatcctgtgagtttccatattcagcactttttgcttttcagcagtaaaagcattctctgtgggaggagaatttaactttgatctttagagatgccctttaaatgtggttatggtcaaaaaagtgactgtgaacactcaaagtcaacaggcaaaggtaaataccacgggagacctggagcagcactgaacgggaggcccgtgaggcacagaaggccatggctctggattctgttacagggtacagtcctgggaggatgcagagatcctcttctctgtgctcacttaggctatacccttcatttgtaaaacaccattaaataaagtactttcgtctgcaaataattgcaattgcatcttctaggaattctttctctgggtcatccactgctgagccccctccccaggaagtggaattgtaagtgaaaggggaaaggcacttgggagggggaatgatgttcaacaagactccttgaaaagtcagccggggtccaggcacggtggctcacacctgtaatcccagcactttgggaggccgaggcaggtgggtcacctgaggtcaggagtttgagaccagcctgaccaacatggtgaaaccctgtctctactaattagatgggcgtggtggtgggcgcctgtaatcccagctactcaggaggctgaggcaggagaattacttgaccctgggaggcagaggttgcggtaagctgagatcgcgcctctgcactccagcctgggcgacaagagtgaaactctgtctcaaaaaaaaaaagaaagaaagaaaagaaaagtcagccggacactctgaagctctgtggcagatttggctgtgtgctacggcctaaaattggagacggcaaagtggaaacggtttaggggaggagtagaagctttgcagtcaggccagcagcatggagactcatgaggtgaggggccagaggcaagtagcaaacctctttaagcctcaattttcttttcaataatatgaggatcctaactcatattttaaaaggttaaatgaggtgatgatagtaaaagttccttggaaacttcaagtcatcaaataatacatgttctatttgatcgttctcatttaaaaatgtggtccttgtttggtttttgtctgttgtttattttgtttttgtcgtttggagataattccactatgtgtctatcagaggacttagactttaattctgagatcgattcccccctcactgtgtgaacctagaagggttatgctttgtgcctcagtttccccacctggacagtcatggtgctgattcctgccagccagtgtcaataaccacagtgaaaggatactcagacagtcacctctacagcctttgaatatgggttttcggttgctgagtaaaatgctcggagacgttccggttactatggctacataagaaattaccccgaaacctagtggcataaaccaattattaggctcatgagttttgttatccttcactgaaggctcgttcactctcaagtctggaggttgacgctgtggttggctgtggcctcggttcctctcctgcgggcctctccatacggttgctcagcttgggctaatctgagcttcctcacagcatggtggcgatttccacggactagaggcccaagagagaacaagaagcaggtggaagtcataatacctttatcaccttgtcccggaagtcacgcaaggccatttcttgaggcaatcataaagttccatctgagttcaagggggaagaaaataagctctgccttttgatgggaagagagaggcaaagataagaaatattctgatggtcattttgagaaaatgcgactgtgcctcatgcaaaggagttttcagttaatgcttgatgactgactaatgtttcccaccttcttccttatccaactttccataaaatttacctcctcttcccttttccctccctgccctttacgcagtggaaatgaggagcaagaaatgcgcacatgtagagaggagagagaagcaaaaggcttggccttgctaacagcggccacctgctcttggcacttcagatgagacttggagtgaccccaacccaggctgatcacccccactgctgcagagcctgctggtttcccaaagcagagaacacagagggctttgcacctaagtatcttgttcgcatttcatattctctccgactggcaagagaagggacttcgtgtcattatgcaaataatgtaataaaaagccaaaactagcgtgctccctgtggtgaccctgggtaatggatatgccagagattagccttccagagccctgcactgggagcggcggagtgggcccactgagcagggcagccacagggaacttggtctggttgcttttgacattcctttcaccagacacctccagccaagctggtcagccccagacaactgtccttaggagattcagggcagaacagagggaaaggaatgggaaggacacaatgggacattggtgcttctcaggccccatgtcttgggtcattctgtgttagaaataaagctcagcctacgtataaggaagaacagagggaaagggtctcccactcatgtccacttctggcatttttcctcctctaactccactggactcataactgtgaaatatttgttccttcccacacacaggataatggcagaaatttctgttatgtcttcccgagtgaaatggggagatactcaaaccaccctcttcttctttccttgcccctctggaggcttttccatctcggccttagctagactgtttgaagatgcaatggtttgctcatcgttcatatcggccaggccactgtgcggccatgctctgatcacatcccatcactcaactcatgtgcacatgaaaagtaacatttgacttaatctaaggaaaacaaatgttggaagacacatttgtaagtataacaagaaaagatgcatataggcacacatatgtgacaaattccaaaataagtgaaatttttaaattcgtgaatgcacagatgtacccacgccattcttctgatattcactgagtatgtggtgtacgaacaacagtataaataggtgctagccacctaccattttcattatctcacaacagatgcctcctctcctcattcacagggctattcaggctatgtaacagagccttatctatggcacctagaggcctggactcagaaaccagagacaggcagaggactgagcctgcaatggaatgacacccatggttttaaaggaagagtggacacgcagattagtgaaatcggctctgtactctaggagcccatgggatttgcatttcaggctctatcatcaccaaatctacttattagtagtttaggcaactaatcttttaaacaatcaacattcggagaagtaggtatcgctctggctttatctgaactccctcttgacccatctccaacccaatggttctcacgccatttctcagcattggccttcattaaaattttttttaactttttttttttttttgagacactgtcttactctgttgcccaggatggatggtatgatcatggctcactgcagcctccacctcctgggctcaggtgatcctctcacctcagttttccaagtagctaggaccacagacacaccaccacaccttttttttattttttatttttatttatttatttttttgagacggagtctcgctctgtcgcccaggctgaagtgcagtggtgtgatctcggctcactgcaagctctgcctcccgggttcacgccattctcccacctcagcctcccaagtagctgggactacaggcacccgccaccacgcctggttaattttttgtatttttttagtagagacagggtttcaccatgttagccaggatggtcttgatctcttgacctcgtgatccacccacctcagcctcccaaagtgctgggattacaggcgtgggtttttttttttgggtttgtttttttttttttgtagagaaagagttatgccacgttacctaggctggtcttgaatgcctgggctcaagcattccacccggttcagcctccaaaagtgctgggattatgggcatgagccattgtgcccagctttttaaacaatttttttcttttttttctttggagacagaggctcactctattgcccaagccagagtgctgtgccgctacatcggctcacagcaagctccgcctcctgggttcaatcgattctcctgcctcagcctcctgagtagctgggattataggcacccaccaccacacctggctgagttttgtatttttagtagaaacagggtttcattatgttggccaggctgttctcaacctcctggcctcagatgatcttcccgcctcagccttccaaaatgctgggattacaggcatgagccaccatgcctggccacatttttaagtatttactttgtcccaagaacttcaggtgcttgatttaggtactttactcatattatctcattttatctttatccagaattaccagatcaggtactgatattatccccaacctacagatgaggaaatgaagttcttggaaattgtactagatgcgtaatgagcagcagatgaagcttggatagaaactcaaatctctctgactcaagatttatgctctaagttacaataaacaccggagttacacttaaagagcttatggtctaattgagaggacagaaaattcacaagaaagaacctgtgaagagtagtggttatgtgcttaggctgtagacctgaatttggatcccacatcacactaactttctgtgtgcctgagcaagttatttcacttttctgaatttccattttctcatctgaaaaaatagaatacatccctcatagaattgccaggaggattaaattaggttactcatgtaaacagtgttttgtatttaataagtgctgtgattattaccacttttatctgttttctgtaacgacgacagagggtgtattatatcatgtactaaaggcaccttgcccaaactggaggagaaaaagtatcccaccggttcaagtgcattactggtagcaggccccagctggatccaggaccaggagggggtcgtggaaagcaagcatttctatcggcaaatgtgagtgatctgctgtagctcagatgccaccccaagcagcttgccttgccagaggtctctggtaaaggggcatcattgggtacaaatgtgctggggcacttccctgcctggaacaagggaccctatgccaccctctggatctaggactcagtggctctggacccacagacccagcctttccagcattctgcaaaggaaagtgcttctcagaagccaatgactaagccagcccaggggttccttttacagagacaattgttgggtcaagaaggaaccccagagctgagccccacatagggctaggagcccacgcctcctgtctttctcacttggaagtcaattttacatagcatggtctaaagcctcatggaccccacaagtcttttaaataataactaacttctcttcccttgaataaaataatcagcaacaataggagaagcaaagtcatgagaaacggaaggaatgtagtccctctgaggatggctggtgaatttgcatgctggtgttcttcctacacccagcctatcacctcagttaagtacttattgatgatttatccgtggaaagttcttgaacgctagcaacatgctcatttctgtaaagagcttgaagtacaaggaagagttttaagtttaaactttaaaaagttttaagagtttaagtaaagagctttataagacacacatgaagtagcaacagctcctcatgtgtaacaagctgcaaataagtgaaatttctgccagctcagcagctcctcgcctgcagacagcagcagccacatcaagttgcccagactcattcctcttgtttgcctcctccgtccctactctggtcttcccagagcaatttggagagggctccctactaccagtggcatcataaaaatgacagtgtacttgccaagggcatggtcttggggtgctcctaaagctgttgaactgcaaaaaggggtgccgtttatttgcagaagccacaagaatgctctcctccccaactctgctctttcacttgggtctcaaatcagcttgtctggggccttatctccccaaatcttttattccacttaggggccctcacctcccttcccttgcccatattggcttttcaaattcagcccagtgagccagacagggaactcttctccttcatcttctctctcttcacagcccccatgatctatctcttcttttctctacattgtaatggaaaaaaagctttttgtctagccatgattgcaaatagaagggggatgtgtgtgtgtgtgtgtgtgtgtgtgtgtgtgtgtgtgtgtgcacatatgcatacccaaagcagtattctcacgagctgttaacagctcaaaggagtcataggtcatcatcagaaaggtttcatggaaacaggaagctctcaggaagatctcacttaccttacacaatggcaaagataattgtgcatcagggtgaaagagtaaagaaaggttacttgcagcaaaaggaaccacaaaattaaggcacagaagcatacctgagtagggcttgtctagtggagcagtgagaatagttagaattggacacaagttgcagcaagaggaagttgtgcaatgtaagtgtggcaggtgggacaaagatgacctttggaagacaagtggctgagaagagatttgctgtggtccatctctagggagctctctgaggtttttgagcagattgtggcaggatgacagcagtattcacaacttgcaagggagctggatccagccagggagcgcacaaggtgtactgaatgagggaagagcatgtcagtgggtcgtcagggagggaagagtctcagagagaaatgcccagactggacagaagtgtgaggcattcccggtgaaccgggacgctctcctcctacaatgttgccacttgattggagtttccttgattgtgaactacattcttaaggaaacttctattccaaaatgagttcaaactggttttgtgccctttctacacctacactctatctcatcacttgtttttttctagctgtgtaccactcacttccttaagaagtctctcctgggtctgcctccagaaccgctggctttgtgttctctgtgtattctctttgctgtgagtcttgattttgccgtctgcatgtccccttggccaggacaatcctgtgttccctgttgcctggtccaccctccttaggataatgatgggaggaactttttgcccatctatggagcatcactgtgcccagccctgcctcccgggcttctttgcctctgatattctgtcatcttctcccccaacctagaagagggaagggaaagaaattattttactggaaactccaaggttcatgaatgataaactaagaacgtaagccattctctacagcagaagatgctacctgattcctgaaatgtcatctgtttttgtagcaggactgtggtacatgttcttcactcttatcaccaaaagacacttaggggtcataggtggtaatgtgtcctctgcttccagtgcggagctcaaggaatttcatggagtcagggacagctgtctgaaaggttgcaatgtcacccttttcagctcagaaccataattccttgagcccagataacagttcaaaatttaggatatgaagccaaagctgaactctagctgaaatcaagagtggatataataaccaagaaacaaatggttctgacaagcacagctttactctgagcatgactcaagggcatctggtagaaaatgaagaaggatcccagcagatgttagggctagggagatcccctcggttgggggatgtaagtgttttaatattgtgtgggcaactctgctttgaatgtatgtctggaggcacctacaccatccaaagccttctggtgcaaaagcaggactcctagagtatattccagtattttttccctgatcccagctgaaaacagccatagaagagcctccctttttgaattatggctgtctgtccgctggggtggagaatggccctgggagacaagagacagcccatggagcaggttgtaattctacaggcatatgaagagcattcattctgaagaagacattcaattcaggaatgtgaattacacaaggaaggtagacaaatcccagctttaacaagtgctgttcacctatcactacattttcaagtaaaggtggtgtatccatttgctagggtttccataacaacataccagggctgagtggcttaagcaaaagaaatttatttgctcagagttctggagactggaagtccaagatcagggtgccagcagggttggttttcctcagaggcctctctccttggcttgccaatgactgctgtgtcctcacatggcagcccctctgtgcacacactcccctgggggctctctgtgtgtccaaattccctcttcttataagaacaccagtcatattggattagaacccaccctatcagcctcatttcaccttacctccttaaaggtcctatctccaaatacaatcacattctgagtactgcgggtaagggcttcagcatatgaattttgtgaggacacaaggcagcccctaacaggtggcctaagagaatctttgtttgaatgctaataatcatgatacctaacatgttctgagtgtgactcactatgtgccagagacttctaagtactttgcatgtattatcacaactattatcacaattatagattatataattattgattatatagattatagatcaattatagatgactaccatcttctctgaagacttactttggtgtaattatgtgactgtagtgaacactatgccctggtccctgaccttggatgcctgtgattcgatgagacatggaataatgggagactcttaccctcatgttttgattggtagcagatctccggaatgtgcaaagttttttagttgtcgttgttgttgttgtttcgagactgtcgcccaggctgaatgcaatggcacgatcacggctcactgcagcctctacttccggggctcaagtgatcctcccacctcagcctcccaagtagctgggcacatgccaccatatctagctaattttttctttctttctttctttctttctttctttctttctttctttctttctttctttctttctttctttctctctttctgtttttgtagaaacacagttttgccacattgcccaggctagtttagaactcctggactcaatagattctcccacctcaggctcccaaaatgctgggattacaggcatgagccaccatgcctggccaaggcttcttttcttaatccatgatctcccaaagtcacacccaagtcagtgatgggataatatgagtgggaggacccaacaacctcttttggagggtcttgccctgactggcacttcacgtgtctgaggttcctctttcgtcctttggctggctgagtcatcaacattgagatctacaggatgcaccagcacctcctagagggccctcagcaaaccactgagcatttcttacaagctacacccccacaccagatcttctcatttaatccacctatcgactctgtgctaaaactatttttatccctgttacaaataaggaaactgaaattggcctggccacagccatgggcaccacccttcccttgtgtgaccttgagcagcacacctagcctctctgggtggatctcactggccttgcctggaaaataaatgctggatctcatctccccttcattgctgatgactccactcagctcgtaagaggcatttctgcttatgcctggaaaaatctagcattcacacaccaccacaatactatattccatgccaagtcaccactattcttggcctccctatccccaccctcctttttgggggtcccagactacagaaccaataaacaaacccactttcatgattcctccatccccactccactgcccaaagtccctcctcacccaggtaacctgcaaacacccatctggtttgcataagggcaaacctgccccctggagtgtgagtcaaacaggaacttccagacaagctgtcctggggcagccctgggccaccttgccagctcaaagcaagagtgtcacttgcttgggtgaagagtgacactgggctttctgtctcttctctggccctgcaggaggctctgtcggtggtgagcgacgaccagtccctctttgactcagcgtacggagcggcagcccatctccccaaggccgacatgactgcctcggggagtcctgactacgggcagccccacaagatcaaccccctcccaccacagcaggagtggatcaatcagccagtgagggtcaacgtcaagcgggagtatgaccacatgaatggatccaggtaagctcaccaggcctgtgcaggattgggggaaggcacaaagtcgccagatctgcagcaagtggcttctggcacttaaggtttttgcagcagatggggctctagagctgggccaggaagcctgtgtcagtccctagagagctaaggcagagagggccacagactgatgatggggtggagtagggctaggaagcccccctgcctctctggggcccacgaagccctcagaggccaggtaggagtcaggccccaagcgcctatgcagacactcgtggaacacttatttcttgttaatcccaggcccaggtccagtcctgttggggacagcttagcaataagctactcttccctgtcctgttgaagatacttaacccctctgggcaggtctcagcagagcaaaggtgaccaaaccattctttagtaagagtggagaagggatgaggaaggtgtctaccttcctgtgggggctcactgtgtctgggagggggcaggcacctggaaggcgtgcatgaagtgggtacaatactgggtcagttcgggctttgcttgtagaaatggagacaggagggtccagggagagaaaatcacagggtcatggaagaggacagtggacaggcggcctcagttttgcgtcctgcctctgccccttgggcaagtcatcgaaacccctcagagcaccagctttctcccttctcaaacaggactgggatattcacttccttatggtccttactctagcgttactctgatgcctcagggaaaggacctgggatggtgcctgagacgcgttaggaaagtgctctatagtgacagtgattgttatgagcaaagacttgaaagacagagaacatcagtcttattcacaaaatatcagataatctactgggccaaaggcacaaagagatgaaaataaaaagcaacagagggccctgaatggcaggctgaaaacatgtgccatttattccacagccagaggctgactttgagcaccgatgtgacatttaacccagaggctgactttgagcacagacgtgacatttaacctcatcagagcagtgacttaagactagcgagctgacagtccttgcgcacagacggtaggatgggagagtcagaaagacaagtgaagaagttagtaaaatatcccagataggaaataatgaagttcggaactaagtgatgatagtgattttggaaagtgaaaaggacagatacataagggcgatagcaaagagatgattaacagggcttaggtgagtaaagtgtgaatgaagggggtgcatgacaggaaagaatcaaaggcgactaaagcctgcacattttaaaggctggtgctgtgagcagccgcagaaaggtggcacaggaaatgctttaggatgggatgtcagtgttctctttgagattccttgtgagcaatgggtagaacatccagataaaaacgtctactaggctttgggaactgaagctcagataatctttcaggcctggaatttacgtttgggcatcatctctaaggagtctgaactgtgaaagtggatgaggtcaccgaggaaactagtctagattgaagagagagaagggaatgagcatggttgggagggagaactcctccagagcagctcatggcctcagacctgcctgtgggaactgccaggcctaccacatttcaaccctactaaccaaaaccagtgactgggatctcagccacctttccagatcccaggatttcaggaaggctcagaggttctgagcctgcagcccctcagatgaatctctctccagatgtaattctgatggtgccggagctcctaacagtcgaaggacatggtgtgttgaacgttttcccatattatcttaccacttgttcctcaccactatactaagaagtagttactgtaacttcactgttacacaggaaggcaagcagggctttcaggggacagtgctttgtctaaggatttaaaggaggcaaagttggagcccgaacccaggcgtttggttccagccccacgtgccatctgttaggcacctttctgctccctctgcttgtgtgtcatgcttttgcaccaccacctcattcctgccaacgcccacctggtgaggaggcctattctacgatgcctcctaaatggggcccttctccaaggagctcccaatgcttgttgaagatccagatcccactggtggagattcctttttttttttttttttttttttttgagatggagtctcactctgttgcccaggctggagtgcagtggtacagtcttggctcactacaacctctgcctcccaggttcaagcaattctcttgcctcagcctcctgagtatctgggattacaagcacatggcaccacacctggcaagtttttgtatttttagtagagacggggttttactatgttggcccggctggtcttcaactcctgacctcatgatccgcctgcctcggcctcccaaagtgctgggattacaggcgtgagccaccgcacccagctttgttggagattctctggcctgttgtaacctgaatctgcctactccttacctccactgcccctgcctggtgcaagccagcagcacctctcctaggcttctgcgggggcatcctgctctccccacttcctcctgccttcctgaagtctattctccggacagcaagcagccagagccatgctttcctcgtttgtaatcctcttgctcaaaactcttcaatggcttatgacaaaatgcaaagcccttagtgtggccccaccatccctctgacatcctctctactgccccctccctcccacttcttccctccgcgccagcctcataagactctagctgctgctcctagacccccaggcaccctcgtgcctcagaatctcttcccctgagctccttcattctggaacattcctactccatctagtcatatgactctctccctcacgagttttgggtttctctacctgaacctcaccttttcagaggcctcccctggccacctgatcgaaaccagcgcctcctcactctttaccctgcttagagtgtctgtcctagttcttatcacctccctcactgacacgtgggcagggcctgaaacggtaggtgctcaataaattgtcgtcaaataaataactgagaacacatggctgagcagactcaaaagagaaggtgcttgtttaaagttaggacgcagatccaggtctgctgactcagccccttcaatgctgagcctgagttgatgcatgggcttctgagttccatcttcatgctcaatggagacccatgggtatttgtgtctctggtgggaaggaagtatgctgctcaccactccctcccctgctctcagagaatcctcaagcacttcaggatactgatcctgtgcaaagagggtcccccaaggaaattgatttttcagaacccacttgccagctcatacctggctccagtcacaccaaaagccagctggagagggcctgtgtgaatattccagtgaacagacaggatatttacctggctttggctacacagagcagcaacctctgcttttgagttgcttgtcttgacccataccatcagcgggtaacaaagtaggttcagaaagactgatatcttctcacccaccctgggcaagcagagacaatcctgtggactctcagagccaagcagcttaggcacagctatcgccagcaccccacaaatattccctaagggctcacatgtaagctggactagtggctagcaggaagcaaggagttttagaaaaatgtcattgcttacagtggaaccatgtcagaccctatcatttaattatgccaaaagcaatgacagaatgaaataaatgccaggctctttaaatctctcatcctgaacactgtgcttctcctatcctctgagtattattgataatgacagttcgttacttgcacatgatttgattgtttgcagtggtctaattcgccataacacaaaaagataggagaggatgttataatgattctgaacttcagatgagaaaaccaaggcagggtataaaatttgagattgcttggctcatgggctagacctgtgctgttcaatgcagcagccactagccacaggttgctactgagcacttgaaatacggttagttgaaaattgaaatgtgctctaaatataaaccacatactggatttagaagacttactatggaaaaagtgtaaaatatctcattgattatttattatgctgaaatgatcttcttttggctatattgagttaacatattaatatactttaatatattattaaaattcatttcatcgttttgttttcttttaaaaatctggctactagtaaatttaaaattatgtagctcggccaggtgtggtggctcatgcctgtaatcccagcactttgggaggccaaggcggcggatcacctgaggtcgggagttcgagaccagcctggccaacatggtgaaaccctgtctctgctgaaaatacaaaattagcctggcatggtggcgcatgcctgtaatcccacctactcaggaggctgaggcaggagaattgcttgaatctgggagacggaggttgctgtgagccgagatcatgccactggactccggtctgggcaacaaaagtgaaacaccatctcaaaaaaaaaaaaaattatgtagttcgcacatgtggttcccattctacttctattggacagtgctgggccatggtggtctggactgttctgtgattcacagtgcattttttctgcattccttgacagcatgggcttctgagttatgtcttcatgctcactggagacccattggcatttgtgtctctggtgggaaggaggtgtgcggtgcacctgaagctaccatgcccacttgcttttcaccccagtagcaaaccctctggcccaggagcaaagggtcaagtgcagagactgaggtctgaggatctcagagacagagtggcttgcccatgttgagggagttttgtgctctctttcttcatatcttcctgttgtggttgactctgttaggctgggttgccttgaaacagcatggcccataggttctgtgtcgcatgtagacttcagcaacttgatccaaactgtggtctgcaaataactctcagctgcatcctgtctcaaccacagggataggggaaaacatcccatgaagaaaagaatatcaggttatagagggaaatgcaagacttgccttgtgagcctggtattcaggaccagagttcagagctaaccttccttgaaattccctggcctggcccccagggtctggatgccctggacacctagggactcacattccacacagagaaggatcagctcctgttccctggaacttgtgcctctctggctgcgaggcccctttctaaactcttgtgttctcaaccttgcagtatgagacatgtcacacataacctgggtggggaggatacacaggatcctggaaaagttagcagcatctactgtgtatggggatgaaaacagctagtggattagggcggtggctttatcataagtgatgctttttcttttcttggaatttgcttttaagttattgcatctccttttcaaaaacaaaaaagtcacatctatgtcctacagacttcctaaaggcaatacagattgtttaatttttgcacagggtgcatactacgcaggagttacacgccgcgggtcctaatgcagccatgtgacttaggcagcccgcgaggcctcactttggccacgtgaacatcaggtatcctttgacagtgagcctgggctcagatgtgcgggtctgatgatatacccaagttcagttgctctgagttgactaggaaggtagagaagatctttgtacagcctaaagaggtaatcttcaggagaagtctttgaaatctcccttcatccaaacacccaagatcttacaccttgttttaaatggcctaacacattgcaaagctttttttggaaaccagtagcaatgttcacagaacacacacaaacagaactcgaggagtcaagagctatgtccagtggtggaaatgaaggacaagggctaccctaccctcggcagctctgctgtggcctctgtcgccctgagatggagatgtgctgagttattacacccttggggccaccgccacctccctgctctattgtggcagccccaggctctcttgtcacctgtcccagtgctatcagctgccagtgggccccagccccatgctagctgtaagtgcaggtcttaatacaaattagcagcagtgcaggcaagctgaatggcaaaacctcgtcccgcactccccctccctcttgttttcatcaagccttcttcacaggcgccagctgcctcattaaagagcagccttttatgctgggcttcacctgtacccaccctgagcggcagccgtggagccccatggccgcacgcagggcttgcgctggctggaggaggcacggtgcttgggagctgcaagaatggagggaggactggcaggcgagcgggcgaggtatggctttccttctttctctccctgagcagtgggaggagggccagctgggcaagtgtggggaaccaggatggtgccagcccttctccctaaggacacccgcctgcaggtcctagtgcagaagcctgggaccgaggacagggccattttccagaggagaaacaccctggcgggcgagcggccaaaccgatcacctgtccagctggagagcaggtgtgtgcacagggccgggggagggagagaggaggagggaagcggaactgggagaacttctatgggtcagtgaatgaggaggttctgctcagggaatgagtggcagcggccaccccagcaagagagccccctcctcctctgcgtccactttcccttcgtctaggtgcccatggctcctctccttacaaggtcacgtgttaggcaggtttggggaaatgtttctttcagcttttcacatttattttcctccaaccctggcacctgggaccagccctgccacctgtgcctaccgtacatggccataaccataaaggctcactccatttcagtgagtcctgaggtgctgacttctctgcacagcaagaggtcagtttttaactcagaaatccccaggggcccggctgatgtggaaaagaatttttccaaatatcgtatccccaccgtccacaaacgggaggagcccggggagtgtgccctcctgtcccaccatcctgccccctgctgtagttctcctttccgagagacccctgcccataccctatgccctcttgctctgggggtcctccaagggaagagcgtgcagtgtggagcccacctctcccacagaggccgcctgccaatgaaaaccttgctcacttggttgcaggccaacttaatccttcaaacttctgcagcacttggactgtttcacaactgacaaggatgcagggaaaggctgccagaccatgtgcgtgagtgtgtgtgtatgcacgcgtgtgtgtaatgtgtatgcgtgtgtgtgcactgtgtttgcatgtgtgtgcatgtgttgaatgtgtgtgcagatgaagtgtacgtgcatgtgtgtgcatgttctctgtgttgaaatgtgtgcttccatgtgggtgaagtatgtgtgttccatgttggaatgtgtacagtgcatgtctgtgcatgtgtgttgaagtgtgtccatgcatgggagtaagcatatgtgtgcacgtgttctctgttgaagtatgtgcatgcatgtgggtaaagtattgtgcacatgtgttctgtgttggagtgtgtgtgcacatgtgcatgcatgtgtgtgagtgtgtgcctgcagttagccccagggcgggtgaggggacccagtgcactcgggccagagctcagctcagatgcaggcaccagggtctgactgggactgcttcatctcaggccaggtccttccgcagcagaagccaaagggccaaacgctggtgaaaagtcctgatgtgctactgcctcccctcccctcccctgccatggggacgttaaaccttcagcaatctgggactctgacggctggtttttggttctctgcctggaaaaacagtaggcgaatagtaaaaccttaaattctaacatgtgtgagttatacatcttattttcattttcagcccatgtttccctctgtaagacatcaggaaaaaattaccgtctgacttctaatatctcagtggagcatttatctcccagctatgataagtgatcttcaatatttttttcctttcagattaagaaacaaattcatttaattttctttattgaatgtgctcaggcctccccgccctgcctgggtctcaggaagccctgggctgatctcccttctcctgggttagtgactgccgtccctgcttgtgggatgggtgggtccctatctggtacggccctgctcctcaaggcctcgctgtggtccgttcctgcgcctggcaggggatggaggacagtggccaggcctttggaacgtccggagaggttatgcggcctagagttggaaggctgtaatctgaaccttatctgaactccttggtctgaaggcctggtttggagctcttgagagaactggctgtctcccaggctgccagaaccgatgcttcctgctcagtataatggcggctacagcttctccttggccttcccatcgtctcctttggtcctgctgctgctggagtggctgagcagcgggcactgggtgtgacagggtggcacctcccccaagtatgctggaggtgcgtgatgctgggctggagggcatgcagagtgtgtttgccagccagcttcagggcgccaggtggccatgggtgggacttcacccctccagacagctgcccatcaccagtgctgcaaaataccaggtgctgatcaagttctgtagttctaggctaagttggatgatctgctttctctcttgtgaatgtccatactgcttccacagtgagcttggggccagggatgcaaaatgccacagggccaccacctctccatcaggtggaagttcctggactccattccttctccaagtagcaaccagctcttttgcatgtgtgcttgatagtgaagcttaacacagaagacctgagtcctgtttccaccttgactagctgtgtgactgagccaggcagcccctgtctcgatttcattaaccatgaaaaggagatagtaacccttgctgtgcctatcctgggggcttattgggaaattcgaatacaacagtgcataagaaatgcattaaacttatatatgtgcaatagaaataactcactgagaaagcatttgctgctcacctcctgtaagaatactagggttaaacaaagaaagtgatgactatcctctcaagaactcagcagtcagggggcgcaggccaagctgagaatcagacagtgtgacaagtccttataaccaaggcgggcaccaagtgctgggggactgtggggaaggcgtgtctgggagcatggactaggttgcctggcagtgaggctaaaaatgtaagctgcagtcagacagggagggctgcgatgccacacaaagaagctcagaccttggtctgagggcactgaggcgctgccagcagtttttacgtactgtaattataggattgggctgggatttgaagaaaactctggtggcagcatggaggatagaaagagggcatcatcatcatcatgacaccaagtgtggccgggcaatggctccatgctcatcatcggagccctgggctcatgattcagaggctgaggcaagctgccctgtcagtgctgaccgcctctgggctttgtctcttctcactttagggagtctccggtggactgcagcgttagcaaatgcagcaagctggtgggcggaggcgagtccaaccccatgaactacaacagctatatggacgagaagaatggcccccctcctcccaacatgaccaccaacgagaggagagtcatcgtccccgcaggtaattcgagaaccaggctgcctgggcgccattcacttccccactctctgggggggcagggagcatctaaacctttatctgatactctattccctgtggaattgcaaaatggagaaagctgcacgccagccgggagtggtggctcgcgcctgtaatcccagcactttgagaggccaagacgggtgaatcacttgtcaggagttcaagaccagcctagccaacgtggtgaaacctcatctctactaaaaaaaaaaaaaaatacaaaaattagccaggtgtggtagtggacgcttatattcccagctactcagggggctgaagcaggagactcgctttaaccgggaaggcggaggttgcagggagccaagatcacaccactgcactccagcctgggtgatggaatgagactctgtctcaaaaaaaaaaaaaaaaaaaaaaagctgcacattttacctgacttcctagctgccctttaaggcagtatcccagatgtcacctgatgtgtgggtgctagaagccccacccttaaacagaccacatcacagactctacatcaatggcctggtcctcaaggacgggctgctcagagagcagaggcaaggccgcctccacccaaaaggaatcccgtgagctctggatgtgggcatccctgcctgtgaggaggaggtcagctgcagaggccagtccttccctccaggctcgtacttcccggcatctaccaggttccacctttccaaaattacagccagctctttcagttttaaaatagaaagaactatatttaactaatggagtgccttaacatgtgtgccacaagttatgtcattaggtaaaaatagcctctttttcctaggtgttggtgctgttggtcccagaaaataaaatcatcgttcagtccttcagtccattggctggacactccaccccagctagcaccagcaagctcagctgcctgcacaagaagggtgtttacaaactgccacgtgtagaactggtgccaggtagaaggggcaaggatgtccaaatcttaagcaaagtgattacagggcagggattaaacctgatcttaccaaaataactttaccagagaggcaaaactccttccatttgtaaaagcataaatgtagttgcctctgaagtcaaaaggttagacatctctttgaggtagtccgaaggcatctgcttgtaggtctaaaggcagaaatgttaagggctgcctcctgccttggcccgtggtgtttgttttccctgggaagctgcatctcaccatatccctggattacagctgcctccctgtgctctgggccaaattcaagaaggtgtgagcaagagtgaggcagcagacgggtggggcttgtagaaatttctctgtaccctttaggacttagaaatgactcctaaagcaattctaagtttgctcttccacaagcatctgacctaacaaaggaagaggaagaatcacttccatttattgagtgctttctaggtgccaggcaccacgtaaattgctttatctccatggcattacttaaaacacctgtcacaggagaccagctagtaatgtttagcccaggtgtatcgtctccctcctcactgaaagcagacaatgaaactgtattagaactgacaggtgggaatctctttgtacagcccaaagcaaagctgagcctcactgggtcttcactcaaatggtttcaaactcccctgcttcagtcaaacagctcccagcctgggagggaaagcttgctggactgaagggtttggggatctgagattgtctttgaaccaacctttggcaccatctcattttggtcgtcattttggggaaggaatcttggaaatgggcagaagtggccagactgctatgtcgaccctccaaactttctttgatcagtgttgaaatgctttcaaaaggaatagcaaaacatcaggcttggctgagccaagttacctatagcgctggtggtgaaaataaaacaaattcatgtcaaatgattttcaaagcactttcaggctatggatttacttcattattttagctccggctagatcttttaggtcctcacacattttggcttcctccaggccaggctgtggatatgaggggaagtctcatttgggcaagtccacaaatcaaggcaataaaatattagtggaataaccgattgaatttatgatgggatttaaagacaagtataaatgtgggccctagttaatcactagctccatgttcagatgggaagaaactaggactaaatcatccaggaaatgcatttggaagagtttagcatgatccagagttgaagatttataattcattgtgctgtagagggagagtaataatattgttgcagagcccaaagcaagggaggaaataataaaataaataaaatatatggtgtaaaattgaatttgaggccttggatactaaaagtgaggaactgggagaagtgaagaatgaaataatatgctacataatccaactctcccgaggatatgtttctctagaattctgaaaaggtgcaaaattatttccatttgccaatgatccatgcctaattgcttctggagagtaaaagagcaagaaatgtatctgagagagagagaggaagacatacttgtacaatgacactttagaggagctccgctttctggcttcagagcagtgtaactcacaggtgaggtaaagcaggatggtgagaagaggaaaggggctttgggggaacccacctcttcagcttagtgaagtcctataatggtttctattggaaccccagcccagatacttaccagcgatggggctttgggcaaaggacttaaccttttaagactccattttgcatctgtaaaatggggatattaaaagatttccttggtaagtaaaaatagggctcgcggagcaggtggcacatagcacccaccatctgagccgtcactgctcacagggcattaggttgttggaatgacattcagcagcaggctgtgacctgtgaacccaaactctcctaactcctcccctttgccagctcctccaccttcagcacaacacagcagccactctcgtgcatgggcagggcctgggcactttacaaagcagactactcgggccctgccacccagattctcacacataaaaaccaaggtggaatggagagtccaaggacagttggtggatgcttgtgtaaaagtgctgggaaacttgcctctggctgcccagctgtgaagcgtgagccttgcttcttgccccacatccactcctagtcattcaatcctggttccctgctttgccaggagccttcacagacgctgtagaatgagagggtgagttgcttgaggggtagcacagatattcctgcctaataaatatgttaaatcaaacaggctcattagaagccggaggctaatggccgacttacaataaaatgccgagtctctcctcccccaggaagtcttccttgactctccaaattttcactattcccttccacttatgagtcctcgaaccaccgccacacagtccattgcttagtagtggtgtgcttgcctacctgtttcatgggaatgagtatttcttgaaggcaagcgtcatgtaattttcttctatgataaggatatttaaggtgtttattggacccactaaccattggttgccaagtgaagagatgggcttcagactgtgatgagtgataaaagagttctgcctactgtggaacctgctggaactcatcacttgtgctgaaagtgcaacatccccaccacacacacacacacacacacacacacacacacacacacacacacacacatacacacactgagaaggaggaggaggtatgagtgtcctaccatagagatggcctcagtggttaccttacctgtgttcactcaagagctaaaatgttctccccaacgtcatctctcatctttgggtatttaaatatctaaaatatgttttggggatgccctggtagaaatttctacacagctgtgctcaaaaggagaaaaatctagtttgggtttctgttcaagactaacaccgctgggtttttcaactgcacagatggaattgcagtaaaagtctctctgtttcttttctacagccatctgagggatccgtgttctttcatgaaatcattaatattcttaaaatacagatggttcccgtttccagagacattggtcccggggtctgtgaaattgtgtttattttcattttgatgccaccatttctcaggcaaaggttccaactgctctccaaaactttaaagagtgctctgtcaggatacgtagtgaggcagctaagcacctccctggagtgctaagtggttcaggcagcgccagatgccatggagcctgatgagtgttctaggggaaccatgtggaagggagctctcccagagagaaagagaagggaaagaaagagggacaaggggtgagggaggctgcctaggctctcagggagcctctaccttcctgcagtccttgctaacaacgtcttctcctctgcagaccccacactgtggacacaggagcatgtgaggcaatggctggagtgggccataaaggagtacagcttgatggagatcgacacatcctttttccagaacatggatggcaaggaactgtgtaaaatgaacaaggaggacttcctccgcgccaccaccctctacaacacggaagtgctgttgtcacacctcagttacctcagggaaagtaagtgccgcccaagtacccagggctgggaggaagcttggcatggagccaacccagggagaggaagtcagtgctgcccgttcgtgttgggcagatgccgccggagcagcatcgtggggcctgtagtgttgccaaggtcacgtgggctcctacagaccctgtgaggggcagacccaatcctgaagtgtcaaaggaagtaagacgagaaatggagaaaagtagagagctgtgacctggaggggtctggcagaggctggttacactcttcccatgagaccgcctttccagaaactattccaatttgaaaatagatagagatgggtggtgccctggctggtgttttcctaagtgattatttaaaattcctccaggaaactctagattcaaggcttttggatttaaggtgttgaaaataatttacatattagcttcctcttaatcttgggatactctggcacaccctaaccccatttgacagggctgctatctgcacacttccttgataaggaagagcagccaaaggtgcaggtgtgttaggatccattggaggctttcttctggtacagccaagaaaaggaaaagagctttggaaagggcgagcttaagaaagaaagcaggcagttgtccaagagatttatctagtatgaggtactctagcaccaagcgcccatcagtctgatatgaatttcatttgatatgaaatatacacagagcagaagaatggaattattttagtcctgctggtaacctcagcctgagtgccctgctgggaatccaggccaggtggtatatcaatatcagtgctacccctaagtatggaaggattgtcctggggcctgaaaagatggtgctaggatcacaggaacacaggtttgggctcacactacgtaagagcattctagcagccctgtgcaaagacagggcagccttgagatgctatttgttgtgaatggccaaggcagctgcgagtcttgcaggagtttagctttgggcaggggcttgatgattttaagcccccttcgcaagttcagatccttagacagcaactctgggacctgcttttcctggactggctggctctgggttggtgagctctgtttgctcgccatcgttctgtggacctttaactccccatctttggaatccactgtcccttcagcgacagtgttcctcatggggcaggggcaacacgtgctggctggagaaatgaaaaatcaaaaaactggctttggcagtttccactggtgcctctgtgctctctggtcacctttccgaggcgtctggtaactagtgcgagaaagtagatgatgcagtatttgttagctccggagcaattacctcatgtctgagtcttgctgcaacatgaggtcagcccaagaaacaatttcaaaaaaggggacaattttccacccagtttttcagagctttggataattagcactttctaattcatattttcagcttttaactgtttgtggaattttaaaaaataaggatctttgaacagagtcctgcagtgatctaggcaggccagggtgggtgtgtggaggttagcatgagaaggagagaccagcaaagcaacctgattccagcaggagtttgcaggaaccctaagccctttccttcatttgccaggagtagagaggacaacagtagcatagacagcatgctctgaactgttagttaaagggcccagtgcttcgagactcttcggcggatgcccttgttgggagaatgttcaaggcattctctccatgtggggaaagcccattcatgccatatgaccccggggccctaaccagtccataaacagcccaaggtcccctagtacttcctgccaccgaacaatgggaacacagatgctgaagtgagacaaatgcctgagaaggtggtcactggtcgccagtagagagaccttctattggagaagagcagataacaaggttgaagtggaggtgcagaggatggcattttggggggtatagcatggcaagaaaaagcaaattgcttctttctttttaagaatatttatagacagaaagtgcccccaaatcaataaaaatattaggtttcccaaaagggacttattagtggagcatatttccagagtggagaggaggtggaatccagcttgtatactgaagacatttgaaaatgcagggcagatatccagagtggaggatggtggcgaacagtagtacatccacaagatgggaagtagttgttctgccattgaaatgattattgggaaacaccatgagaagtgcttaggatacaatgttgggtggaaaagctcattataaagtggtctgtgcactgatagaaaaaccatgtctgcctgcgaaagcaaaaaattaaaataatcgtgttaaattaaaaaaaaaaaaaacttgccccaacatggtattgaaatatccttttgaggaacctagacttaaaatgatccactgtcaggcaaaaggcttttagattcatgctgctttttaattggtgtctaccttggggttccagccttggggaccctctagtgtgaggtggtggctggctgctaagcgcctgcaggaggccatgggctggcgatcgtgtctgctctgtttctgctctggattgctgggaactcccccgtgacaaccagcactttaaacgcttttaaagccttcaaacactttattgtttttccagactgacttccagtggatgttctgtgcttaggaggaaggccagtgcttgtggagagtttgaggcgatgagtcaaggcaaggggagagggtgctgattctttgtgctttatcatcttgtcctttcattggagaggaaggtggggctcagatatttccactttagcaagagatggatggaaaatagctgagatccttcactccggtggaggaagtactgcagggtgaaggaaagttgatagagcagaatcggggacctgagactgtggctggttggaagtcagtagagtccaagttggtggcacttctctgatctaatctttctgggctttatagaaagtctagaaaaaggaaaacttcataggataagaagctttggcatcaaatttacatttcacaaaaggtgcttgactatttattctggtggtttgggaggggagctagacttttacattttaaatgcaaatgtattttccagggtagagaagaaatagcagttccctgtgcccctacagaccctgtctgatggccaggcatgctagggaggtgcttgttcttcacacctgggcgtgtcagctgtgccagaggagctgtgtcacacgccacacaggcgcccacccctcccccccaccaccacaggaaatgcaaggaggactgtgatggctggggtggccacggttcttgggggtaattcccatgagtcctgggaaactccagggtttacacctgtcaatcccagcactttgggaggccaaggcgggtggatcacctgaggccagaagttggagaccagcctggccaacgtggtgaaaccccgtctctactaaacatacaaaaatgagccaggtgtggtggtgggcgcctgtaatcctagctacttgggaggctgaggcaggagagtcgcttgaatgcgggagggggaggctgcagtgagctgagatcgcaccaccgcactctggcctgggcgatagaccgaggctctgtcttcagaggaaaaaaggttgcccccttgtggacaactatctacagtacccattttgaagctgaacccactgaggcccagacagcttcagaaattggttcaaaggcatccagccgattgagagcacctggcatctcagactagggcctctggagtcccagtccctggcctcgcgttgccgacgttcccccggccctggagacagcaagccagcctgcgccacacaggcaaggcagcctcactcccggccttccacgtgggcagcccggccacttcccccacagcattttctgttgtcatttgtaccaagagataaatgctttccaaaaactttcctgtggcctcctggaaggaggccgattaagccaaacctatcaccacgctaactttgtccttctctgggcctgactgtcggccccaccagtatctctcccggacacaccccgtgtggcagaggagccttcgcagcagctgctgcgggaacgagatttgtcccttctcaggccaaggcggggaaggacctcgaagaaacggagggcgccgggctggcagttcaggctcagggccgctggggggagtttgcgcaaggctgggagccccgaggccccgggggaggtggggaggcagaaagaaaaagagccttttttaagttttacaaacaagttcgttttgtatgtcaatctgggtctgacctggaaaaaaaaacactaagaaactgcgtcttcaaacagtggctgctcaaaagaatgaaactgcgcgaccgggagaccacggaaagggtgtctatcttcattcccatttttaatttaaactttaatggaaaacacattttgcattttctggtctttccacctgcagcctcagatggtcgggcagaggttttgagtctgggcaattaagctggtgcaatcttatcacttccaggcctgggtttgactggtgaaggagaacagaatgccagctgaacaaaaggccaggtttccctggacccagtagtcagccaggattgttgtttaaagatcccagagccttgcaccctcccgctcctgcacactcagccagagctgttgatatagcagtgcagcccagagaaaagagagacctggattcaataggctggctgtgagggggcactggtgaattctatggtcacagcgaggcaggagacaaaggctttggcactgggacgcttgcgccccctggcccaggtgtccccgatgaaaagcaggttaggttgagggaatgtgaagcagcagaaaccgtgattgttggggttctaccccacacctgcaaagcctcacactgctcactcccctctcctttcagatccaggtactgtctctagcagcacatggattcaaacatggaatggaaaatgatcttttccccatgcttgcactttgggaaggccattctattctcagcaggagctactttatgctttttagagcaaaaatgccctcaataaatagatatatgtatatgcatacacacccatatacaaatatatacatacaaacacatatacagaaacttacaaataaccaagtaggcaaatcttatacttcagtttgaactgaagtacaacacagagagaagtgcaaaaatcatgaagtgcgctacgtgagacattatcgtgacgtgaatccacccactcccataagcacctcccgggccaaggagtagaatttcagccccctgtaccctctctccaccccacaaccgcttcctccacaaaactaaccaccaccctgcttcccagccccataggtgagttttgcctatttctacgatttagcctggaggcagtgggatctgccagattgaggacaggttttgtgaatagaccacgatggggctcctgccttctgcactctctggctgtgtgatcctgggaaaatgatatgacttcgctgagtgttgctcctttcatctgtaaaaaggaataagggaatgctggctctgtatggcttatgcaaggattaagtgagaaaatagatggaaagcgtctggcacaccgtgcatgttcagggagcactgcgtccccaccaccaccttcatcatggcctgtttaccctgatgtgctggcatcgggaaggtgggggagctcagcagcacaggcctgtggcagggtcaggccagaaagagcctcaaggcaggagaaagcagtccaaagccacagagagggaggccagactccaggaggacctgcctgcatcagaacaagttccttaagaaaacagagcctggggaactaatgaagtagaaatcggagaagaggagggaatctaggtcccttgggagagaggccagatgcccccaaccagcccctccttggggaaggcagcctctccttctaggagtgaaacttgaaccaagaacagtctttagggcaaaatccttttcctaggttgccatgaaatatacatttcatgcaagctttggagaggtcaaatgaccctttctctcagctttctgggagtttcctgtggaattcatgtgtgcccaaagaagaactttcaccaatggggaaatttaataaatgtggtttatctaaggttcgtgctttcggctacatctgcactaatgactcaggcagtttgctcctcggagaccatcatttttctttatttgctccagcagtgaggtttcagcctgagggagagaacgtcagggacggagaggcaagcattcttggtcctacttctgggatttttttgtattccctccgaacatttggttccatttcttcacttccttccagtcgtgccggattatttcttattgcagcagaacccattcataactttaatcagaggacaggacgaatgttcagtaaacgcatgtataaagagaactattgtatgtaattgtgacatctgtgggagaaaggatgtaaaaatagtaacgatcatagctagcatttatggaacacttatgagccaaggtccattctgagcacattgcatgcattatttgatttaatcttcataatgccattgagtggtgttagcccattttacagatgagaaactgctggctcaaagagatgagggaaatcagtggagggcacaaagctagtcagtgataagaggcaggtctaattttaaagtctcctttgcttaataaacatacagtcgtgctttgcttcatgatggggatagttcatcttcatgtgaataccacaaaatgtacttacacaaacccacatagcatagcctactacacactgaggctgtatgctacagcctgtggctcctagcttactaagctgtatagcatgttattgtactgaatatagtagacaaccgtagcacaatggcaagtatttgtgcatctaacttttaaaagatacagtaaaaatacactattaccgttgtcgtatatgtggtccatctttgcccaaaacatcattttttggtgtgtgactattaacaggaacttgtcccagccttactttgtcattggtattcttgaacatggaataaccaaatgtagctggctcttggatgttatattcatgtgactgtctcatttctaaaatggcatccacatagccacactttggcatacagcgggctcaataccacccccgtcatccccctccttgttttcatctggagctgctgcagagctagaactaacagtcatattctaggcaattggacaattcttataaaattctcttcctctgccgggtgcggtggtaatcccagcactttgggaggccgaggcaggcagatcacctgagaccagcctgaccaacatggagaaaccccgtctctactaaaaatacaaaattagccgagcatggtggcacatgcctgtaatcccagctactggggaagctgaggcaggagaatcacttgaatctgcgaggcggaggttgcagtgaactgagatcgcgccattgcactccagcctgggcaacaagagcgaaactccgtttcaaaaaaaataaataaataaattctcttcctcatcgtctggcttggatagtgcacacattttctctgaggcacacaaccaaacgcccacagctgggtgaggcggcaactccatttcggcatcccttccatgactggagactaaaaataggggtgtgtctgacagcccattcccacccctggcacccaagccagtccactcggccacagggagcggggaaaagggttgtttagaagaattttcttagcctcgaatacatgtgttgagcttatggtatgttttataaaagcagatcccagccctcgtttcaagggctctttaagatttccttaggagaatctcaaagagaatggcaaaaatgcctaagtttcacaaaatacaaccttgaattcactttaaacaaaggaaaaagtctagttttaggaaagaagggagaatgtgttttacatgtaacaacaaattgctttttcaaagtgctgggtacagaagaggtatgaattgaagtttaatttgaaaagattggatatcagcattctgagattacagaaaattcaacgcgtgactcctcaggttcagtgcgtgctcttagacataggtgaagggaagcaaaagttcctattggaatactaccactcacctccttcccaactcccattgccccctccaccagtaacatacctgtgtaccttaccctcacctgtgaaaggacccatatgtacataaacccagaagataccacagcaggaaggagtgatactggcttctcctccaggccatggcaaagtacaagctgcaggccaaatctggccaaaagtggcccatggacaaagcaaaacaaaaactaagaagactgtgcaacagagattgtagttagcctatgaagccaaaatatttactatctccttttgatagaagaaatctgccaacctctgctctagttcaagaaaaaaaatcaaaatctagacatgtcaagtcactcaccaactgtcacatggtgagttaataacaactggaatagacccgggtttactgattctcaatgctgtgttcctatcatgattatggcacagaccacagcgcttcagaactatgaatatggcagcttagggggcgtggtgtttgtttccccagagagcatttcattccaaagtattctgtctcttcactccataaagctattacaggcctgtatgattgtctccaaccaaatggattccattcgcttttcctttcttcctaggagtcctctgtccctcttcccctctccccatctctttccctttctactccctcctcatgtcatctcctactcttgatctcagaagaacattttggttataacctgtttatgttttgcctctcaggttcactgctggcctataatacaacctcccacaccgaccaatcctcacgattgagtgtcaaagaaggtaagtttgttcttttgtgcacttaaaattttcttctgtaccagacatgacacaggcccatgctgttaaggttgttgcagaaaaccagcttgcgtgttccactcaacttttcctagcatacaaagacaagccaaaattttcgccacttgtgctaccagttgcaaaaatacagtaaagaaagttttacagtatcttgtaataatatcacaaagatacaacttgaagttgtcactccatgcaggaaaacatgttacttttagaaaaaaatgaatgctgcttactttcaaagttgaaagttgggagttttctctgatgaaaataatgaaatgaagagttcaaggattccagcatgtctacctttaaaggtttttttcctaagaaattttagcagccggtcatgctggctcacacctgtaatcccagcgctttggggggccgaagtgggtggatcacttggggtcaggagttcgaagcccagcctggccagcatggcaaaaccaccatctcagctaaaaaatacaaaaattagccaggtgtggtggcaggtacctgtaattccagctactcaggaggctgagacatgagaatcgcttggacccaggaggcagaggctgcaatgagccgagttcgcgccactgcactccagcctgggcgacagagcaagactctgtctcaaaaaaaattttagcgatgtcaattcatttttaaagtggtggcttaagggtttggtctggtttggtttggttttgctgagaaagaaaacttcctcggcaaatgatttttgccagtgaagattttagtacacgtcacaatagaattcctcagcgtctttatgaaacatcgtgaggagtggttcagatactgttagatttcaggcattgaaacaagtgaataattcatagtacctggtttaaaggaggaaaagatgtgaacaaataattattaggaaccagagagagactggaaaaaatatttgcgcggcatagcaaaaattccacagaggaggggacttttgaataggagcttgaagaataataagagtgtggcaggcactctgtcctccttggctcgctgtctgtccccagtttttctttaactcaccctccccaaaatatataagaaaggcagaagttctcaggatcagttacatatagcacagcactgcaaaacctttcagagaaacaaaggctcttctaagggaaggaccatttggcttaaaatccgcatggggtgtgaaggaaacagagagccaaaggcactagctggctgtcttgcccaaggttacaactttgatcacacagcactttgtgtttcctgttaacaatttataatttaataatgaccagaacatttagtggaagaattatacaacataatgaatccgcttttaaacatttgtgtttttcatttgtttccttctctcctatcccaccctgagccagtcctgtttctgccactgtttttcctttccaaatcagatttcttgagttttgtcatgaacgctgaatttctatggattcattctacattgtgagtcagatttcactttttgacctattttaatatgctgttgcaaatgtctgtaagagagaaaatacattttagtggcaaacgcattagattgaaggtcagggcacctttggcttcctgtgagaaaaccacttcaggccctgaacctcagtttcctgcagaacgaaagagaagaactctgtcagcaagaggccagccctgactctggagatcttggcctctaaggagatgacaggagcactcacattgcgagggctcaagagccactgtcctttgatatgttctacatactgagttttatttcatttgtggatagggatccactttttggaaggaaggaaaaaagaaggggaaaaatgactagagggagagagagagagggaaggaagggaagggaaggaagatagggagggagaaaagcaaggctataaggaaggaagggagggaaggaggaagggagggatgggaggaaccctaacctctgaactgctgagttcggatttttgtaagtttctccaacacttcaggctacaacctgctaccaacatcagaattagccagtgaggctctgaagcagagctaatgaaatattttctgatattgggcttcagatatagggtttagtttagaaactggtttagccaagttgaaatgtgttgctaaccatctcctcctcctcctcctcctcctcctcctcctcctcctcctcctcctcctgctgtcttattgttcagccgtgtcctctacctgccatacacatttccttcccttggcccttttgtgtttagggaggacatttgtaacactgctggctcattcaggcttattgcaggagcagctccctcttgctgggtagcaacccctcttctgaaatgaattaactgtagtatccaggcaaacacacgctgccaggacctcattcaggtggtgccggcatttatctcccaacatcgggcctggcctctagagacgattaagcctgtgctttgcaggtgcatcttttgtccccagtaaagctctccacttgagctgtcttgctcctctatgccttccccttgtgaggtggtctgaatctgtctgaacgacccatcaagccacaaaacaaagtacattagcaagacaaagctaagcaagccctccctctatcctccctgcctcctccccacctctcactggctctcctgctctgctctaatcactatctattagctattagaagacatcaggcaaccttggctccatcttctttgaataagacacacacagccccaaacaaacccagagttcatcaagagcaccagagctgtgtgtgtgtgtgtgtgtgtctgtgtgtgagtgcacactggtgcagtccacaaagggcaggtgctggcatcaagcacaaagcaaggaagttgaggagatgctgtctattaatgtcttcaaagcacttatcaaattagaatggctttttgctttaaaattgtataatcacccttccagcttgtctcttgaaaatggctgcaatctctaggggttatttgtgcccaggaagtaagagtagattttaaaaattaatttagaacaatctttaagcccctttaaattaaatattctatggacatggattggatccagctagagcagttatgctctacctttagtttatcaaggctaaggcacttaaaaaaataaactaggataaaagctattgttatccatttacaatagcagccacaactgtcatctgtaaagggttttggaatatatcagacacctccacatgctttgctttggagcctagcactgggtctttgaagtagatattattatctctattttgcagacaaagaaagtggggttcagcactattaagtgactcactgaagggtacacagctactagatggcagagcaaggactcaaaccaggttagaggattagactagaaccccctcactttctgacaaatacagcctttctcttccagctgccattctgcaaaagcaatacctagcctaaatgtaacttgggcaaagatgtgaatgttttgcattacttgatttctgtccatgcagttttcccactgtcagctccatctccatccctaaacttttctctctttccaaagatgaaccaataaacaacttatgcttggcaccagcccttagttctgacagcacagagaatcaccaggagatctttcaaaatactgactctaggacaaacattgcatgattgcactcataggaggtaactgtcaactttgtagagccagaaggtacatggtggttaccaggagcggcaaggagtggaaatagggtgttagtgtttaatgggtaagagtttcaatttgggaagatgaaaaggttctggagctggatggtggtaatcgttgcatagcattgtgaatgtacttaatgccactaaattgtacacttaaaatggttaaaatggtaagttttatgttacatattttactaaaattttgtaaatgcaaaaattaaaataaaaaaatactgatgcccaagtgccaaaaaatgatgcattaattcagaacctccaagggtgactcctgggcattggaaatgttttagagctctccgggttattcatataagccaagctgcagccaagctagagaagcctgctttatagaacagagacaaactagagagaaatgaggcccatgttagagctactccagattttcttggagacacactgggcggttgtctggacccagattgtcctagaaaaggaatagcaggccctactggtatattgataaaggtataggtaagtgaagagactgtacgatcttgattagttttttgtcattgtcattgatgactgattttattgatgcatgatgttactgatttagacaactgtacgttcgtacatctcagaaatttctttctgacgtgtcctcattcagtcctctaaaaagtagatatggtgttggtaacgtgattttataggaaggatactggggttgcagaagttaagtggccttttcaagtgtgtaagagtcctggagccagggctactgactttccacaccttgttctctcccgtcctccaggctgcagatgtgcgtgtgtctgccctggtcccaggtcagagcttccctttgtttttctgggcaaaccctgccggaggccttcccagcacactcagctggcccagcagtgtgcaacaatcagcacatctcttcctcagagcttctttgcatgcctaagccctcatttccttagttcctcatgctgaatctgtttaaatacctctgactttccaaaagacagaggatattgagttccttgtttattaactcctggaactcatcaaccggccaagggcctgtggagcactgagcttctagccccagcctggagcctttcaggactgccattgaacacggaaactgaaaaccacagccccactgcaagcggaatggccatctccagccattgccttggctgatggataaaaagtctgtcggcttgcatgctaagtatggaaaagagaggggagaaactacctttctgtgtcccttagagtgaaatgcctggctggtgctgaagcccatgttaacgagaggctggcttctctccaggagagtcctaggtggcaggagccatgcacatggtaacaacagcattttggcagcctggtagggtttgccaagcacgttcctatccattatcccgtttgtgccctctggtgccatcaccatgagatgagaaggctggtagtattattatcccccttctatagataatgaaaacaaggcacagagagatttcagggttccttagaaggcacccaggtcatgaagcagaacaagactcaagtccgggcctttggtgtgttctgtccttcctctaggctgcttctggaatcattatctcagcatacttgattcaagcatctgacaacatcttaaggattctttaatactctcaatttaccgaaggtgggcactggtctcctatttcagcattatagcatactgattaaaaacttgggctctggactcagactgtgacctggacaaggtgcttacatttttctgcctcagttttctcatgtataaatgaggataattgtagtgccccttcagggataatgtaaaactcataaatcagcacagtttctgacacaccaataagtgctcaataaaagttataataaggatagtaaattgttattctaatttattatagtacaaattctaatagtaattaacattattattgaaagctaattacaatttttttttttttttttgagatggagtctcgctctgtcgctcaggctggagtgcggtggcgtgatctcggctcactgcaagctccacctcccgggttcacgccattctcctgcctcagcctcctgagtagctgggactacaggtgcccgccaccacgcccagctaatttttttttgtattttttagtagagacggggtttcaccacgttagccaggatggtctcgacctcctgacctcatgatctgcccgcctcggcctcctaattacagtatcccgctaattacagtatttttgagggtttaccagatgttaacaccgtaccaagggtcgtgaaggatactatacatagatagccaagctgctttaaaacttattcgggggccgggcatggtggttcatgcctgtaatccctgcactttgggaggccaaggtgggcagaccacctgaggtcagaagttcaagaccagcttggccaacatggtgaaaccccgtctctactaaaaataaaaaattagtcaggtgtggtggcatgtgcctgtagtcccagctacccgggaggctgaagcaggagaattgcttgaacccgggaggcggaggttgcagtgagcgaagatcacaccactgcactccagcctgggtgacagagtgagactctgtctcaaaaaacaaagcaaaaaaacaactatttagggagacacacctaggaaatatgaaggaaatataaaactgcatgtaatcgaaaaacaacaatgcatgctacacacaagatattttctgagtgtaatgaagagatggaaaatcattaatgctcaagctgaacatctcctccaaatcccttatagaacaggagagatctgaggccagagaaggtgtggacccagccatggtcacacagggagtgaagacaaatatatacaattattcctatgtaggcagatattatagatacatgataccttagtcaggaattgacctaaattctgtgattcatgctctcctccattcattcatttctttcttatggagaatcttctctgcatagaataccaggctgagccctaaaaccatggtgaacacagcacactacctaccctcaagcaggttctagtcaaacagagagacagacagctaagtaagtaaggaactactgtgctttagagtgagggcaatgcacgtatattaccacgtctttcaattttcccctgcatttagctcctgtgtggatgtcctttatgattttagaggtcatagtaaaagatggaggcctctagcaagctgcagcatggcagggctggaaatagatgttgaagcaaagggaaggaggaaggcaccaaggaaaccagcgtgtttgttggggtgggtgtgtgagttttcaagttgggttttggagacaggagcccaggtgagcccttgcaggaataactgaggcctgggtgtttgatgtgggtttcaggaagacaccctggggtagaacctgtgcaccatggcttcctggtacctggaaaaccgggtgcagttggatgtttcattgtgagacaggaagctcagcgaaggagcggagagccagggacttgtgtcaaaatcatttggccggggagggcggagtaggtgggcatggagctgaaataagactgaccatgaattcatgattgttaaagcagggtgatggggcctcagggttcattagactttcctctctacttgtatatatcttagaaattctccgtaactcaaaaaatgcctcaagatatctttgccttatttctccgggcgaagagtttcccgaggagggcatctttgtccctcgcgatatgcactgcctgtgtcaggctgatgcgctcccgggtgcagtacttgggaaggcgggcatttggcagccttgtgtgtgtgtctgtgcaggagggcgtgagctggtgctcagtgtggaggtgggctgtgtgtgttgccttgtagagtgcagcgtatgggggctaggtctggaacatgtgtacccaaaggaaaaggcctgtaatactgtgaggtaatctcctgttatttttagggagtaaataacatctctcatgcagcaggttgtgtggccccacaggccccatctacgtcagctcacacacacttcaaattggagggtatcgcggcctcacaggagagcctgtgaagaacattgtcattatatgttcttcctttatgatgaaatgtgcctaagccattcttagcaaaagcagggatgattgctggatgtgtgtgtgtgtgtgcatgcatgcgtgtgtgtgtgtgtgtgtgtgtgtgtgcacgcgtgctgtttctgtggtccaaaggcaagatttatgattatgggatagacagtagcttgctctctctattttattttttaaaaactgttttcctttgaaattcctgagttaatgttctgtctgctttctatctgaccctcttcggagagttgcatttttttttttttccacgagagagagattaagagagagagagacagagagagagagagaaagaacgagggtgacagagagaaacagagatcgggggaggagggagagcgagagaactggaaacaaagactcgttgtctctaagctggagcaggcaggaaaccccaatccctcgggaacttagccagcccgccctgtcctggagtcagactccagctctctgaattcaatttgacagcttgtctgggacactttctaagtaaccattatccttcctttctctaagtaaaaggactgttatttcttttcgtgggtgtgctgtgcgaactgctattgcacacgtgtggctcacacagtgactaggacacactttcctcaaattattggaaacagcccgtttcctaagacaagtgtaaatttgttccaggataataaggcaaaagactgagtatcagtccactgccttattagaggtgggcctattccattagaggaggaattttgtgtatgtaggttttacttctttgaggattcttttgaaatagacacaaacaacaatatctcccaatgatcattctccccagtttctgtgttaattgatggattaatttaatgaaacgcatcaccatacatcccactgtggagggaactcagatgtcctcaaagctaccagaggttgtgcaggccacgggcacaactaggggtgaccacctagagttcaaaggagcctgtcttctgcctgggaacagggccatcctggggtttcttttaattactcagacccagttgagtcaccaccataacctgagggactgtgaggtgatcacctgcccttcaatgtgttcctattggaagaccatcccgattcagctctgtgggaccgctagagacaagttccagaactgtctggatccccctggagcgtagaggtgtgatagttttgctcagtaatacagctttgcccatttaggttctgacccaaagacctgtccttcaaacatgacttggttcctgtctactctatcttcaaccacactttggaataatgtttccccattcttcctttgccgggtatacctttcatccgtctcagtccccacccccagtccatattctaggaaaccacactcaccctttagggccgtggtcagatcagacagcatcacctcattacggtcttgtgcacccttccccaggatgctttgcttatacccactgttttaccaatacagcattcaatagattctagcccagcagtcttctgtcttgtgagacgggaagcgtcttgaaggtagggactattggatggatggatgaaaataataggcaaagtaccttaaactgttccccagcagtctggtgtagaactaaccctttgagatgtttctacaaggtggatgttttggctctatccactgcagctgctggtgtggcattgcctttcctccctaccctgccctaaatttccattgcatgggaccccagggtggttccttggaagctgtgatcagtcccatccctgaacaaggaagcaaaactgataaagagcagatttcaatcacaagatgatggcaccagagccccttcttggcccaaccaccgcaggatcctgctgccaactggactccacaggcccttcaggtctctgcccatcaggaggaggctgaggacacgccaagccgaggaaaggtgacgctgcagggagagtgtaccttctgctcaattccaccttcctttcttcacttatgccccagacagccacaataagagctaacatttgttaagcacctactatgtgccaagaaatttcctattcatttcacatttatccttcataaaaccttgttaagttggcactatgattattcccattttacctgaatcacaggtatgatgttaagcctgaatcacaaagctagtatgaaacagaaacagaagagagcctgttcctgtagtcccctccccacctaggcaatggcaagggctccaaaatgaccctttcctacttcatctaccacccccatcatgcatttcccccaagtagctgatgttgtctagttgctaagatatattcatctattgactcctgctaccatctaaaaaatcaggagcctgacccagtgcaatcaatcttatttgcatttcaagaagcaatctagcaatttagaattttagaaattccactataaagaggttgtttgccgggtgggatggggcggtggtaatggagctgcaaagtatataaaagaaacatgctttgtccacgcttatcagtcaaattctttctttctatccatccctggagagagagagggagaggaagcttcttccatgccacatggagacaaacgggcttcagacatcttctagtgaaagaccaacgtataggaagcatcatttgtggtggtttcacagattttttttcattgttatgctttataatttatataattatacacatatccttttgtgtttaatactacatttaagaggataaaggaaaacaagagatttagaaaacaaagtattatattgagtaacactctattgatgagaatttcaataaactgaatttaagaaaccatccaggcacagtggctcacacctgtaatcccagcactttggaaacccaaggtgagaggatcacttgagcccaggagttcaagatcagccctggcaacacaactagaccccatatgtacaaaaaataaacaaaagtagccaggtgtagtggtgtgttcctatagtcccagctactccagaggctcaggtgggagtattgctcgagcccgggagatcgaggctgccatgagccgggattgcaccactgcactccagcctgggcaacagaacaagaccttgttctcaaaaacaaagcaaaataagagtgggggtggataaattcaataaatttaataaatttattatttgagggaaataaagtttccctcaaataatttcatgggtctatcagtttcatgggtaatcctctgcctctgtaagcttcataaacccatggttcccaaggagaagaaggaagagatgtcaaaatcaacttaaagcatcttaaagacacgtccaggatgctccagctgccccaccctgccccgtgtccctccataaattcacctgtgcccttggtagatgaaggaatgaggagaaggttggagatgaacacttgtgttcttagaataatctccttccattgctctggaatgccccacccctgccctgccccagtattgagagccagggcttcatcccaatgcttaactggagaagaaaggcaccttcctgccactacagagttcgcctcttctcacccctgtgccagaaggctccaggccaggcactgctcctgaccactcagaagttcccactttgccctttctgccttccctgggctgtctttggtctttctgcttatcagagctgcccttaaatgcaccctgaataaatcaagaccctcataggtgcccatgtgctctgctacattaatgatggtgacaatgaatgcatgagccctgctacattttagtaaaggacggtgacattaggtaaacctccaagtggggcagggaactggtgccaggctgtgggactgttgctgggggtctccagagcaccctccccattcgttcccattggactcagcccaacaatgactcctcccgcactgccaaggaggggctttcatgaccctgagtgcttggcagggtagagctccactacagttctcagtggcagttcacatccactgggtgggccgtttgggttttgcatgtcttctaatttatctgcagactctgggatgttactattttaggcctgccatctctaccaagtttccccttgacactacacgctcatcccactccagacgacagagcgaggactgcagatgcagttggccttgcttgatgcagcttcattgctattgcttggttcacaatagaagttaaaagtgatccccgttggccatttagaggagaagggtcccaaaatactttgggaaaaaaaaggacaggcctataatgctctgccaggggccacctcagcacagagtgttccaaatgtgttggttctgcctagtatactgatttagaaattccaccacatggaggttatttgaggcgattggtagctggaaggtatttaaaagaaacttgtttcaccaaattctcatcaaccaaattctttctttcatctatctggagagagagagagacggagaagcttcttttgtgccagacagagatctatgagcttagggcatcttctagtgaaaggccaatgtataggaaacatcatttgttattttaatataaaaacctttctaatccctttttatagattgaataactctctctcttcagaagcccttatctaagataataaagagcatatttctcatgaaatatccttgttggagaaaagaaagtccttgaggaggaaatatggaggctagaaacactacccaggttgtgagtgggctttttctttcttgtctcagggatctgtaagatcgagaagtttaacatgggtcaggtgtggtggctcacgcctgtaatctcaacattttgggaggtcgaggtggaaagatcacttaaactcaggagttcaagatcagcctaggcaacatggggagagtcaatctctacatcaaataaaaaaattagccaggcatggtggcacgggcctgtggtcccaactatttgggaggcttaggcacaagaattgcttgagcctgggaggtcaaagctgcagtgagccaacattgcgccacttcactccagcctgagcgacagagtgaggccctgtttcaaaataaaaatattaaacagaggcttaacatgcctctttgataaagtttaaattcttgtatttggcatattctaaagaaaagatggtaaaattaagtgggacaattactttatctgtcaaaatccaacacactcttcaaaacccgattcaagtcctatctgcctcaagatatgtttttcttcctccttaagactatagtctcctctcggagcctcacctcattcacaggctatttatggacctaattacagattaccttgtggtctttaattgtgagttttctcctggctcttttcttccagccctgtatatattcagtaaataccattgaatatttactcaatcctgctccaataaaggaagaaccagaagaaattagctttggttgacacaagaaaaattaacttcttatgtcccatgaactaaactctgaaaaagagtatcagctagagttctgtaggatgcgttagaatatagaaagcaattttttttttttttttttgagacagagtcttgccctctcgcccaggctggagttcagtgacgctcactgcaagctccgcctcccgggttcacaccattctcctgcctcagcctcccgagtagctgggactacaggcacccaccaccacgcccaactaattttttgtatttttagtagagacatggtttcaccatgttagtcaggatggtcttgatctcctcacctcgtgatctgcctgcctctgcctcccaaagtgctgggattacaggcgtgagccactgcgcccagccctagaaagcattttcatatgcatggtgtcatttattctcaaaagatccctgtgaggatccagtgtgctatttgcttttccaaactcttaaatttaggaataatcacaccactctctcccgcccctgccaagtatctaccttttacagagaggttcaataagaggttcagagaggttaagtcatttgcctcagaccacacagctcataactgacagagatgagaggcaaagcaaggagttctgaccccccagcccagagttctttcctttgcaatgagccatttccctgtttggaatggattcacgagaaattatggaatttcttcccatgaagatctttaagagcccttagtaacaccaccaacagtcctatgcttgataaattttaggtatcactcttccaaagagatgaaaatcattcttggtatcattttgaaaaatctttgagcttaagaagtcttcggccttttgggcctgtctgcaaaataattatcagccctgcccaatacactagaggaggttagagagaggcagttttttgctatgagtcataatttcaatttctattaaaattcttacatggccacatatgctacctctcaggctttgggcctctgggcctgtgctaatttgcatgtctggtttagataatgtctgaggtccttccagtctaaaaaggagcctctgatgctgtgatataataagtgagatcacattccacctaccaagacttgatggttctttttcttttaactactgtgctctgtctgatgtgtggatgcacagctcagggacggaagtgtttcctgctcacctgccaggccacaaaagaaggagtgctcttggccgggcgtggtggctcacgcctgtaatcccagcactttgggaggctgaggtgagtggatcacctgaggtcaggagttcaagacaagcctggccaacatggtgaaaccccgtctctactaaaaatataaaaatcagccaggcatggtggcaggcgcctataataccagctactcaggaggctgaggcagaagaattgcttgaatccgggagacggaagttgcagtgagccgagattgcgccattgcactccagcctgggggacaagagcaagacttcgtctcaaaacaaaacaaacaaacaaacaaaaagaagtagtgctccttcagcatgaactcacctgtccacttctgctacactgaacccagagacttgtcctttcctgcaaagcatttcagacataggtcaaaaggcaaatcatgggaattgttgggattttacgtttcttgatttgaatggccgttctaattcaacgtgaatccaagaccacagacttgacaatcacctgattcaaaatatgtgaaaagtacttgagtctttaaaatatggggttcatctcaccttttactattcctctcccaaacatcaaagagatgctgtcaagtttcttagctaactttgctatcctacaacataaagcaactctcatgcataaaaaactaattaaaaggaattggctttccagagggactttgagaccaatgtcagccaatctgtcacttttcaaaataaaattatggaactatgtagagctctattttcataatgttagatcaagtctttgctcaaattctatattttcagagaagacctcccatccctgcactgcctacttccctcctctggttttctcttcttcatagcattcatcgccttctaatatacaatgtaatttactacttgtcttgaatgtcagctccacagaggaaggacgtttgtctagcgattgttgtgttctcagcatgtaaagtgtctggcaaggtagtagacattcagtaaaacattgttgaatgaataaatgtgtggtgggacataaggcatcaattaaatccaataagttggtgatggcgaggggcaagaatgaatttttgagagaaacaaaggtgcttaagatacaacccctcttcctaaagatgatcacctagcgagggacacaagcgtacaaagaattacactcaaaggctaagcaggacacgggcagtagacacaagacaactcaccagtgagccttgacctgcagaactttgaaagcaaaggacacagaagctgaatgttacgcagacccaagagtgtatcccctatggccaaggagaagaagggcaacctcgctgtgaacattgcaacctatgagggtcggagcagggcagagggcgttgcgtataaactgcctctcatttatcctcaagcctgattacctaagtgaactgttatgttttcttctttctacctggaatcctcttaaaccagaggcagatttgacctaagaagtatgcaatttagttgcgtctacatgacccaatatggaaggaagttttggcaaacacccagttaatctagtcagtatgaattgctattccacatgaggctggctcaaaaatcccactttgaggccttatcaaaataaataggtcatttagacatctgtgtcacttagacacagagcctgtgggagaaatgaaatagaagaaggtcccaggttcagcagggagcctcacgtggccatggcaaggctgtgcccagagaatgtgccacttcactctccacgcttttcatatttaaaagtcagctatttcttccaagccttttcctcgtaggtctttttttccctttgcccatctaatatcttcaacagtacctccattatgctccacacagcagggtcagctccgaggcagaggggctgttggattccaggacaagatccttgagcaaaggaaacctgatccaggatgttttttccctgtgagttccaagtttggggaaagcgttccctggatattttcctccttccaaggtctcagtggatgccaagctcctctgttgctctttgggatgtaagacgccgctgaagtgaaggtttaatagcccctctagaatggtgggatgtagtgaggacttggtcctgagcttcaaggccaggtggccagtgactctggcacctgacagtgggggaggaaggaggatgctgggtaatgcctgggcctaacagccaggcagaccacctgtagccatcagccctctctgtcttctggggtggggtttctcaaaccagggtccaggataataatccacctcttcttttaaaagaaagccacgatttattttattatattattattattattattattattattattattttgctttggagacaggatctcactttgtcacccaggctggagtacaatagtgtaatcatagctcactgcagccttaaactcctggcctcaagtgttcctcccaccttggcctcccaaagtgctgggattacagccctgagccaccacacccagcctgagagccaagctttatttaaatttgggaatcactgttccaggagcacaggaataaaactgtccttcatcctttatagccctcaggcttctcttccttttcaaggccttcctcaatgggcttggtaatctcatctcaccaagataagcatggtagaggggcaagcaggatggaatagactccatgtatatggtgtgtatttttaaaatcaccatttatcacatgcttatttaatcctcatagcaaccgtagaaagcacctgttattaatgcttttcagagaagcagaactggaggttcaaagcagctgagcaacatgaccaaggtcactccacaaggccaatggcggagctgggatttgaatcccgggttaactgattcgaagtcctatctcctaactgccaaaataatccccaggcccaccagagagaaaggataccttcgtgatgacatcctaagccctgcatctactttgcctcagggtggggctgagggcgcggactcgagcaaagactgcagcagatgagaagctggtcctgagctgtgggttgggaaggttcgggcagtgcagcagttctcacaggtggagagcaggatgaaggaacgcttagaggagagcagcttctgcaggttggtggctgggagaggctgctcctccccaaagactggacctattagaagcacaggacctctgatggagatggggttttagaggatctcctagtccagccctctaccagtacacgtcataacctgtcggacagcccaacaacaaagaccgccgctcacctgcagtttcttccctgtcggagtctgggagtgaatcttcctcctcgtgggcttggctctcttgggaagttgagggctttgggtctcaggtctgccattgatttgagcatttctcctgtgcatcctcactctttcaagaaaggaggtctggatctggctaccaaatccccctgctctgctgggagcatgagcagccttgcccattgctcggctgaaaggtctgcattcagaagccaggctttccaaggataaacagggttaggtgctgccagccttcttagcagcaaccagaaattcaatgagaagtttcagggaaaattcatctttttccacccagtcattgagagcaaggttttatgacacagaggatgaagagagaggcttttgtgggctgatgtcgctgtgttgctggcctctggtcaggtcacaaggtggagcgctgcatgccggcagggacgtttgggctttcagacagcagaggcatcagagcagaagcaaatatcttcccaaagatgtttggccatatttctaggaccaggttaaaagcttcacacagaagctaagttaacattggtatgtctatgagagggtcatgtccagaaacagctttcgccttccaacagagactttgcggaaaaaaatctccatgctcatatttctctacctcaggaggctctcctggaatctaagaggccatttagtgtcaaattcagccccactaagcatcacataatggtgatactgttaaggacatcatatatgtgaggctgaattatccacaatggctggcaatgtcttcattctccagactgaggctccggcctctttgctttggcaagagttgatctcaggactgcctgaaaccagaaactccaggcaaagctctttgggtcactcttctgaaaaggaatcacaataataagatctgttatcttggtactctgtaaagccaaggtgtcagccttcacgacagtgaaaagttagtttgtcagaaccagggtgtgattgtctgctgattaagccatctgccaccacagaaacagaccaagatcatcaactggtacactggtgccgacggccacatttttacacactgggcctttggctgccacctcaagtttgtcagttctcaggaggcagactccaggcaccacattcgagagggcctccatgcacgctcaggcttcttctcatagcaggcacaccctgcctgagccccactccatgcgctgacggagagtcggggcaggagctctcatgcagccaggtgttgggctctgcaagggggtttgtgtggggatgtgagccactgggtcagctccctggttcaggcttctgcattcaggttatagacatatctctgtgtgtatgttggggactagagatgaccacactgctaaattcttcttgagtgacttttagtaggaaaaaaatatgaaccctcacttcaacaatgacattgttaaaaacacataaaatgcacaccacttcaccgagcagcattcaggccttgacttccctgtgggaacaagcttttagcctatgcctcatacataaataggtggattgtggtccactcagaggggacacaggagtgatgtagtctgtacccctcaacaccccagatggaaatcttttgcctggaggcttaatttcgtgaagaagtcagggtaggagcactgggttctcttcagctagtgatatcatgaacaataagaagaattgtgtgtatgtagcaagtaggagaaaatattggccaagtttattcattcaacaaatacttagagtctactaactctgtgtggggccctgttctaagtgcttggatgtatcagagaacacaacagagatccctactcttatggacctgatgttcaggagggagggggatatgaaccataaacgacaaatacaaattaattactgattaaattatgtgataagtgaaaatggaagagcagaggaaggaggatgagggagttgcggggaggagggaattaatgtggatttggaaggctgcccaacatgtttctgggtctgaatatttttggtctgtgacacaaatcgtattcttgattgctaacatccactgaggccacctctgtgctgggcactatgctgggtgtttacttgggtatctcatttactctgcaaggctggcctggttcttcatacccctagggcagaatgcaagactttagttcttggccttctgcatcttcatgctttttctttggagcagaaattgctctgaaaatgctgggtttaacttaaatcttacattgaccagacgtctcctcgagccccagagcctacggagtgcttttgttaaaccccagagccaatgtgctcaggctgtcctttgtgcagccaggtaccagtgggaagattttccatgcaaatacttgggaataaaaaagaaatgagagggaggcctgtggtctttgctactctgactccacaggctgctgggatggacgttggatgaagacaccagcttagggcatggcctgttgctatttatgactctattacttcacagtgagagcacagttcaggctgactgctgggtggcctctgtgtttctgtcacttcctttttcacctatgtgaggactgtagcattgattgggacttccaaagtcctgttagccaagcttctgccatcagatgggcctgtgggcacattgacccataaaactctgcctccttcctaaggccctggggcaccacagaaagatgggcctgccaagccactgctctgataaggcatgcctttaaccaggctccatcactcagagctacaggaaaatcccatggtcatccgccctctgttggtgacagggaattccatcatgcattcagatttttgcatgcctgctctgtccctggaactagaataagagaatagggagaaaagccgataagaagtcaacgataactatagccatggccataatttgggctccaaaagaaataattctgagtggttaccagatagctttcagagagggttgaagccttcagtagactaatgattgagcagaaaaaaatgtttagaaaacttgagacagattttatccatgcagtaagtcagaagtcaagtcagaagttcagatgacatgtacgattccctggaatttagtgattttttgtttgaatgtgttacttctcttctactttctgttctgctcccactagaattatctccttcccccaggccctcagatccaccccacataccacaagctcattcttcaccacaccctgttttctagcatggctgcaagcgcaaaacctcccttagttcccacctgcaacgccaaggtcccagagtttgctgagctaccatcagcaagaccttgaacatgcctcggccctctctcctctccctccacattgctctacttcagtggtacagctcctcccatggctgtctctagacctcaccttgacatctcaccacccacctctgccttgttcctacctgatgcactctcccctctccaaagagtcacctggccctagttccactcacctctctgtcaacctccaggaaccctttatgtgtcctccatgccttaggcacatgacccgtgtttcctcacaatcacagttaccctctcatactcacatgcaaggacgaggaacttgtttcctattacttcacacccactccctggccatgcacacaatacagtgcagaagttggtcccaaatctattaccagaggcctaagcagcagcctcctcctgctcaaagaaaaatgttctgccgctgccaacattgcacttcctctgcaagacatctcagaaaatgcccatcagagccttccacctcattccaagcttgcaagcaagctggtctttcatttgtcttgtttgtttttaagcaagaagaatccctttagaggaggaattaggaaagaaaaaaaagtcaaacagaaacagaaggagtggaggtttgtctctctcttttgtcccctgccttgcccttcctccctatcccatccccctcactttctgtgttgcttttcatgccagttgctaaagactgtaattttaaaactgaacgggcttttccagagccttgaggaatgtgcatctgcacgtggatttttccacaaaaaaagtgtccctgtcttttggatcttcttagccagaaacaatgaggccaggcaatcagagtccatccgtcttcccaactcttattctaatttgtttgagaggctcagaaggggctgaagggcatggttgtgtttcaccccgtcagactctgttgtttgatgaggtttgtgctccatttgttcggatggtttttatggtttctttgttgttcatggaataactttgaaggtcataattctgtatcctcaagctcctctgctattcctgctcaatgtctcaatgggactcataccaagagaaagggaaggaagaagtttccagctagttagttaagcaatttctcaacacatttatggaagcatgtggaatctttcaagaaaggggttacgatcacaaaagttcgatttgaggagtattctccaagacaactgagaagcaagcccttagtcatgcccaggtggggagcaggtctccaacctctcatttcctgatccagcccctttcccagccacatttctggcctcttccctttctctgtggtcatcagcccagccctctccactatcaatagaaaagcccgagagccctcagagagcctggaatgtgctcccaccgctgtgatgtcatcccacatcatccatgtgctgaaatcagggactggagtcggcccccaggaatgtcatggccatgggctttgagacactcttcttatgggcctttcacccaatccagaccttgcctgctcttcagagctgcttgaaggattttgctacagaactatggacatttaagaaatgtctaaccttgtgtcagtttatatttgtagaacgcttcataaggtgcttttccatatgttatctcatctgatcatttccacaaccccataaggtagataaaacataaatttttatttccgtattaaaattgaagcccagaggagacttttgattcatcccaggtttcacaacaaagagtgtcaggaagagaacttgaaccaatcctctgacttcacattcagggttcttcccattactttggctcccagataagactacaatcttctgaaagtcagagtgttaatattccaaccccagggggtgagtacacttccagaatttagggatgctttaaaagccattgctgaattgaattttatttctcctgatcactacagataatgctcatgcaacttttctgagaagcaggcgatgctaatgtacccctatttgttattgttcattagacccttcttatgactcagtcagaagaggagcttggggcaataacatgaattctggcctcaacaaaagtaagtaaatgttttatagttctttggaggaaagcatgtttctgaggacaggattggagaacaggatcatgagacacaggagagcagcaagcatttgtttccctgctttttgagtagacatcaaaattatttgccaatttagggcctttccatgataccagtccttgaaagatgatatgggattttcgtttagatttttgagttttgttttattgcgctcggttttagaacatgggaaatttgaaggttttcttgagacaaggttctgtaccaatgaatggtcactgtcactgggttttgcttttgttatttaaatcaagataatgactctctataattttgctcccgtaactgttgaggctaagtcgtaccaatttccccattccccttgatactgggtagatttcctcatatcatcatctcaccacttggtggagaaattgatgtctcagaaccctgccatctcctcaacaggttatcttctgtccctgatgaggagatgccggggggtctgggacatcaggttctccaccaagtggtgagatgatgacatgtcgaagtctacccaatatcccccagtaagagaataaggggcaagaatgactcatgaactcctgtaccagaaatcaaacttgccatgcctaggaagcaaaatatgaagcacatgaacaggtggtaaagggaattctttcaagaaagaggttggggttacaaattaatgcccaaacaataaccaagaccccttccaattatgtgtattaattatttacttactctgcacatgacatttggcaatataagattcacaaagatgaatcagacatgcactggtcccataagcgggagagagaaatcaagcacacacagaactcctttcttctggttggtatcaaggaaggctttgtggacctggtagcacttgagttagctctggaaggagaggcaggatttggacctgtggcgatatgggctggggaagacatgagcttggcatgtctgacagtcagtgaggacctcaggttcctggagcttaggatgtgtgatgcagaagaagtctggaaaggtaagaaacagaattgtaaatgatgctatgaagatatgccttagttctttaggcaatgaagagtcactaaggttttgaacactggcgtgtatggtgggttgtggggagacagaagagtaatgaggacaccagtcagactaagccagaaaccatgcaagaagcaatacagatctgtgatgcagaagtgatcatgggaatggaaggggtgtgtgagagataccaaggaggaaactcacaagacagggacaccaggaagcagctgatctttgctcagatgtcactttctcagtaaggacttctctaactttccgatttgaaaatgaaatccacagcctcagtaccatcagtgatgctatactgttagtttactttttaaaaatttgaaaatgaaaaggtgacatttaagcaaagacaaaattttaagaatttaaaaatgtgtttattattgtctctcccattggaatgcgagttctaccaggaactgcttgttcattcctgaatctccagcctggagaacagggccagcacatagtagattctaggtaaatgtttctaaaataagatgaataaatgagtcagtggagagtgggcgaaggaatgagtgagaaagcacatctgtcaagacgtcttgctcccctcggggagctgggtcctactcactgcatttctttccctcttgccacaggtcctccccttggaggggcacaaacgatcagtaagaatacagagcaacggccccagccaggtacctgcccaggatatgtaatctctcctttgcttcctgcacagttgttgatttcacatggtcaactgatggagggtttaaacaatataccacatatgttttctcttatttctctcaaagagggtctatctttgaccctaatagtcctgtgaatgaagtaacaggtactgacatcaagtagagacttgttaaatatcaaaggtgaaagaacttgaagatgaactattccaatgctttattttgttcaataaagaaactgaggcccggggaggtgaagtgacttgctaaaaaccatacagctggttaatgaaagaaatagggctacaatcccagatcccccaaattcctgtccaagccttttatgcttcaccaaaccttactttcagaaatatccccatcctgtgatgagttggcttaacaattaaggcagaggaactttgaaagccatggacctggagactccgtattggagaggaacttggagatttctgggtctatcctaccctcacctctaccttacttgtgcttgtagtaaaacagggcgttgactttctagctgggctcagttccactatctgacccaaagtctgcctcctggaatttccactcaagcttttccttctggagaagccttcctcctgcttcctccgaaatcctttgcatatctgaagacagctgctgtgcccaagccccagctcctctctctatcttcttatgtgatgcagctgagatgaagttctgaacaagtcatttgctttggggtaggcaaacattgttccccatctccacagaaggcagagcaagagaaaatcaactgacatttcacctggaaggttaagaaaaaatttgctgactgtggatcataagtcagatgtagagagttttaaagactgtccaataacaacaaaattatgcattagtcatcacctgccaaaaataattatcatattaatgatgtggatgagaaaagatggtctcaatgggcttaaggacttttgaaggtaatttatggttctaagtagaaacccaaaaatcatagtgatatttttaaaactgcaattatagttgaaaaatagcaaaattttacaaaatacatgacaattttgccaagtcgagacccagctctctaccatgatttcctcaactaacaaaaaaggagataaacctctcacctaaaccagtattgcaaagactttttcatggctaaataaacacatacgttttgaggaaagtgagattttaagaatagtcattttatagctaaaatgtacactctggtttgtgctgacatttctggcttgtgtgacatttcaaatcacagagtgttatactagaagaaaactgaggaatccagtagcccaacccactcatttgtcagatgagaaaactgattcccagaaattgtccaacaagttatttgtttatcacatagctgctgctaaaacccaggctgcttggtttctaggcatgtgtttttcatgctacatttaaaaaaaaaaacagattaataatgttgttagtattaggtagagttattaaagaccagtaaccatgagacctgctttaagcccatggagtcagctgtccgttgtatcattgaatattatccagttcctttccaaatgttttctttgttttgctttgggtaatgacaacataatctgcacattttagatgccaaaataagaaaaagtaatcctgttcctattctttgttctttctgtaattattgagatgaagaccacaaatgtcatcaagatctttgagatctgcaaataaaagcagtaaagttttctgaaatcagtctttcctgtgatcttgaaataaaagtataaacccttatggttttcttatggttggtacggttgtcatattttttaaaaacactgaagcaaatttccttttttatttccttagatccgtatcagatcctgggcccgaccagcagtcgcctagccaaccctggtgagtttaccttggcctgcaagccttttttgccagaatgtttcgtagctttgtgaaatcacagagacttctgtcctaagtccagacacctgagtggggagtaacatgcacgtctttccttgaaatgttcaatgtctgtttctggagcatgtgaacaacaggtcagggcttgttatgaggtgtcaaggttggttagctgaggatacttctaggaataaacacatcagcactgcacatgtgcacttaggtgtagatgagtaataagtggcacaggtaggtaggcgtttcaatcagagaaaatgggcaagaaagaaaagaagacaactccactcagctctcagttgtctcccgcatgccaggcacaagttcataaatattccaaagggttttatttgtgattttagaaagtgttgccaagttatctggccttataaaagagatgtgtcctggaaaagttgcagatatagtcaatttgaccttgtactttaaagatttagtatcaaaaataactctcaagagggtccttctaaaccaagtccatcgagattgggagctagcaggcccttgtcgcagtgtggcccactcaccttcccatcccagggactctgcctacccattccttagtgcctggtcattactgccagaggagaaagcagccacccagcatattctgggtatttttctctctgcacaagttctctgtagaacttagagctgcaagccaagctctgggcctgccaagggccaatccaggtcctgtccatccaaaagctaaagctcatggcgcagcttctcccaatgactcccacagtcatgccttgcccctgactttttattgctgacagggaattccctgggggacatgaccactaattagagatcagtcagtgattcaggcctttctagatgaagagattcaaaagccttgccaaagggattgaggggggatatggctcacccaagatcacacagctagttctgggcagagtttgcacctcacttcccacattccatttaccaggccttggggcaaagcatcttaggatctaacctcgcttattatacccatctccaaggcaagcagaaaggcaaatcaacaatgacataagaagggcttgtcaagtcgatcccaatgtcgaaggaaacaaaaggtttctttaaaaggatgagaagctccctgcatttagggaactgggttctgccttctctgggctgaggtgttctgttctctcccgtttgcctcacggcgtgcaggaagcgggcagatccagctgtggcaattcctcctggagctgctctccgacagcgccaacgccagctgtatcacctgggaggggaccaacggggagttcaaaatgacggaccccgatgaggtggccaggcgctggggcgagcggaaaagcaagcccaacatgaattacgacaagctgagccgggccctccgttattactatgataaaaacattatgaccaaagtgcacggcaaaagatatgcttacaaatttgacttccacggcattgcccaggctctgcagccacatccgaccgagtcgtccatgtacaagtacccttctgacatctcctacatgccttcctaccatgcccaccagcagaaggtgaactttgtccctccccatccatcctccatgcctgtcacttcctccagcttctttggagccgcatcacaatactggacctcccccacggggggaatctaccccaaccccaacgtcccccgccatcctaacacccacgtgccttcacacttaggcagctactactagaagcttactcatcagtggccttctagctgaagcccatcctgcacacttactggatgctttggactcaacaggacatatgtggccttgaagggaagacaaaactggatgttctttcttgttggatagaacctttgtatttgttctttaaaaacattttttttaatgttggtaacttttgcttcctctacctgaacaaagagatgaataattccatgggccagtatgccagtttgaattctcagtctcctagcatcttgtgagttgcatattaagattactggaatggttaagtcatggttctgagaaagaagctgtacgttttctttatgtttttatgaccaaagcagtttcttgtcaatacacggggttcagtatgacacagaatcatggacttaacccgtcatgttctggtttgagatttagtgacaaatagaggtgggaagcttataatctaattttaggaggaccaaattcagtggatggcaactggaacattgattgtaaggccagtgaagttttcacccaactggaatttgatggaaagaaggtttgtgtgtttaagacgccaagggcattgcagaatccctctcagtggacagtatgcactcagctgaccactctctctagaaatagtcaagatatgaactaagaaattttaatgcaaatacatacattcctgaaagacggggaattaaattactaatttttttttttttttaaatgatgacagtggtcccagaacttggaaaagttgtagggatttctaaactcaagcagattcgcaagtgctgtgcgcttgtcagaccatcagaccagggccaaccaatcagaaggcaacttactgtataaattatgcagagttattttcctatatctcacagtattaaaaataaataattaaaaattaagaataaataaacgagttgacctcggtcacaaaagcagttttactatcgaatcaatcgctgttattttttttaatgtaatttgtacatcttttttcaatctgtacatttgggctgtctgtatgtttttatagctggtttttaaaaagcataatatgcctatagctgaaaaggaaacagggctgtttaagtcactgacttatgagaaagcaaagcactggtacagttatttaacaggcatacacaagcagggaaaagataatccatttagatctttaatgctttggaaatgcgtgtaacagtactgcaataatcacagctctgggaaaaacaacgaaactttcccttgtggagaggagggattttcctgctctatataagcaacatatttttagacattaaaatatatataattttgcaggtaattgttgacttttttaactatattaagtgttaagctgacaactgtcaaagaagaccatgttgtaaaataatttgactaaataaatggttccttctctcagtgctgaggacagttttcttatttaccgcccccgttaggtcaaagggttttccctggggaactttcctatttacttcttgcactatcaagaatttttcgaatgtacctactgcagtacagcagaaggtaaaaaatcagtgtggtttttcattgttgttgatgatgtttgtagtgtttttgtgtgtgttatttaaatcttcctccagcctaaaagggttttataaaacagcagctaaggccatggataaacctgtatgtaaggactggagcaaagcgagctggtctatccagactggtctgtgagatttaactctgcagcctcccctgggcacttcagacccagacggccaccttctgccactccagcaaagaataagcgccctgcttccttcaggtctcagaccaggactttatggctcatgcagatttttaaggtcatttttcttcccaaggaagaaacttgcctccagttccttcactgttaggtagcttattttcattttctctattttacaatgaaaagagtgagacctgggaagtccttgatttgcaaggaattagactcacagcattggtaaccctagaaccttcttagggtaacactaagtaccttctagacaacatgtctacctaaatgaaatgggatgtgtttcggaacatttgtctccagtttttttttaatcttgcaccctgccatttaaaaagatgtgtaaagcacatattctcaacatatgcacattgatttataaatcatatatacaaactgttacattattcttcatattagaaaacaaatacaaaatagaacattttaaatggtgatataaaaataaattgaaactgaaattcta

SEQ ID NO: 5 - DNA, 97319 bp, Homo sapiens
acctgcagcgcgaggcgcgccgctccaggcggcatcgcagggctgggccggcgcggcctggggaccccgggctccggaggccatgccggcgttggcgcgcgacggcggccagctgccgctgctcggtaaggccccgctcgctcgctcgcagcccctcgcggtccctcagcccccaccccgcagtgtggacccgggcgcgcgcctcctccggcccagccgcctcgctcctccccgcgctcgctccttccattgcctcccgcgcccctcccctctttcgcgccctccggactcgcccactacttgcctgcggccccggcgtttcccaccccgcgtcctcttccctcttctccgaagtctctcctctggctcgggccgcggtcccgagtggcggcccggacttcgcagacggcctcgccgaggcgctgcgccgggtctggggcagctcggcccgcgcgctcgggtgctgggccgtccgtgggagtctgcggccgcgaactcggcgccaggtggccaaggacctctcctggcccggcccttggatactgtagacacctgggtgtcgtctttaactcttcttttgaggttttgatttatggagggaactctgatgggaaaatgcgtccgcgttctcccctagagcgagtcatcctcaataacgataccccccagccccgccgaattttggttggatcaacgaatagtttacctaggaaatattatgcaaacagatttacatattaaaatactagctgtccctttcttctagtctcttcttatcctggcataaaccccaaaggggttttcaaggactccgaggactgtccccaaagaatctgctgggtagcatagttgttattgaaaaaaaaaatcttcccatcggttcgcgtcagctttctatttggaaagatgagaggactgaatcgaatttgggttgaaggcgacagagttctgggtgcccggcagctccggtccctgtcctaggtctgcaaccttgggactgacactcacctcccccggcctccgcgtcctcatctgtgcagtgagggagtccgtccgagtccccttcagctctgaaatgctaggacttgaagtctctgtggtaaatagagaaaatgcttgcaatatagaagtgcaggaattatatccaatagcttttgttacaaataattctgaaatataaaaagtaaaaaatggaaatcgggggaaaagagttgaaaaacaaagacattttagttcttaaatagttatctttactagttagtaaatctgtaatttcaaatgtgtagtacaatatgttttccagattccgttaatacaaaatgttagctttctattatgtatgatattaagtagtaagtgcatttttcagaagcataatgggctttctaaaggtataagcatcaatacttgcaacgatatttaagctgcatggaattcttttctatttaggaaagaattcagaaatttctatgtctctctctccagatatttctaaatgaagtataattggcacacagtaaatatgcacacatcttaagagtacaatttcattagttttcacatatgtacgtgcccaaataaccacgatcagactgagatatagagcaattctagctccaccctctctgtcagtaccccctccccaggtagccactattctgacttctgatgccatggattgcttttgcctatgtttgaacttcatgtaaaccaaaccatcatcgtgtgctcttttatgtccaccttcttttactcaacattataataataagattcaaccttgttctctgtagcagtgtttttttttttaattgctggtaccattccgtggtatgaatagatcttataatttattttatccattatgttcacgaagcacatggaagttgttccaattttgtgtaattatgcatagcactgctgtgaacattgttttatatatggtggacataaacaccagtataaaggattatgcccacaagtagaattcctggatcatagggaagggatatgttcaggtttggtagataccgtcaaacggttttccacagtggttacaccaatttccactcccactagcagtgtatggcagttccagttcctcacatctttgccaatactttgtattatggattttcttgaataaagaaggataaagtgagaagcttaaacatgagaactttaaaatggttaatagccttaaattctttgaattagaacatgggatcccaatttcccttatattgtaaacactacttttttttttttttttttttttgagacggagtcttgctctgtcacccaggctggagtgtagtggcgcgatctcagctcactgcaacctccgcctcccaggttcaagcgattctcctgcctcagcctcctgagtagctgggattacaggtgcgtgccaccgcacccagctaatttttgtatttttagtagagacgaggtttcaccatgttggccaggctggtctcgaactcctgaccttaggcgatccacccacctcagcctcccaaagcgctgggattacaggtatgagccaccacacccggccatgcccagacttctattcatcatttatgaataatgatgaagctttctaagtggcatttgaaggagaggaacatgttcccaatgggcttttctgcattatctgctgatactggacagagagaagtatttcaatattttaagagctatgatactacctttttcattagtgttaaaaaaaattcgtattcaaagccttgaactgcacatttgagttgccattctttgctcttgttgcttatcttagtttatttgccttcttggaaactcctagcccaagggggaatgattcaggagaaagtggagggaagggacactcagcaaagcttggtttggattggatgtgagcccagacctgccgacctgacattaatgtcccctctgactctgaaactctagttctaatttttgccattatataggtgtagattggatattcatttctttttaggtacttcacgtctatctatagtaaattatcctcttaggtttaattgtgaacttcttgccttacattaaaaatggattaactttttataactaagaaggcactttcagtaactcttagctattggtaaatatttgttattggattctcctgttgtttaaactgaaaaacaatcaggcaatgagatattaaatgggaaggaggaagacttacttatattccaagggaagacttcagataagaaaaatgaagagaaaacatgcattaggaagaaaaaatctgtttttatttaacaaactttaattgaatacccatttttttccttccttccttctttccttccttcctttctttctttctttttctttctttctttcgacagtctccctttgtcattgaggctggagtgcagtggtgtgatcacagctcactgcagcttcaacctcctgggctcaagcaagcctcctacctcagcctcctgagtacctgggaccacaggcacgtgccaccacacctcattaattttttgaaaaattttttggtagagatgagatctcactgtattgctcaggctaatcttgaactcctgggctcaagtgatcctcccaaagtgctaggattacaggtgtgagctaccgtgcctgacagaatacctatttcttgctaggcacaagcagtacaaagattaaagagatggaggtaggggaacttgtgtataaataaccaattttatttttttaagaaatgtgtggtcattgcctttccccaggaaaagtatttcagtatgctttcttttattaaaccttccaacacagttattatgattactaaatatacattaaaaattgcatgagtctggctgggtgcgatggctcatgcctgtaatcccagcactttgggaggctgaggcaggcagatcacttgaggagtttgagaccagcctggccaacatggtgaaaccctgtttctactaaaaatacaaaagttagccaggcgtggtggcagacgcttgtaatcccagctacttgggaggctgaagcaggagaatcacttgagcctgggaggcagaggttgcagtgagccaagattgcgccattgcactatacccttggtgacagagtgcgactccatctcaaaaaaaaaaaaattgcatgcgtcaatgaaggaagctttagcctggtcagaaaagggatcccagttttttgccccctaaaactactttttaaattttttttgagacaagacctggccctatcacccaggctggagtgcagtggtacagtctcggctcactgcaacctctgccttacggactcaagcaagcctcctacctcaacctcctgagttgtgggactacaggcatgcaccatgacacccgactaatttttgtattttttgtagagatggggtttcactgtattgtctaggctggtcttgaactcctgagctcaagcaatcctcctgcctcagcctcccaaagtgctgggattacacatgtgagccagtgcgcccagcctaaaactacttaaaaatggagatatagtactgtatttaatgcttatgggaaagaaaatgctcttccatttaaagtaaaaggaacaaactgttccaaagctaaatatggtcatcttttaggtcttgggaagaagcacttttccaaatcattctttaagcaaaggtattgaccacattttactctgggagggtattcctgctcatttgagaagcccacaaaatgcctcggcttcaacaacatatccacggttctttgtgttcctctcatctcatccttgcatgacactcggcaagcagggtgacagtaactaacccctatcattcaagttcaagattacagtcttgctgcctccccacatacctaccagacattgccttaatctttgggcaaagattttgatttgacaaaaagcaaataatctcaagagtattgtattttatcatttttcttaactttgaaagggatcttgtagataacaggagtaagaatttggagagggggccgggcaaggtggctcatgcctgtaatcccagcactttgggaggccaaggtgggcagatcacgaggtcaagagatcaagaccatcctggccaacgtgataaaaccctgtctctactaaaaatacaaaaattagctgggtgtggtggcgcacgcctgtagttccagctactcaggaggctgaggcaggagaatcacttgaacctgggaggtggaggttgcagtgagccgagatcatgccactgcattccagcctggagacagagcgagactccttctcaaaaaaaaaagagaggggaaactgaagggctggaaattggcttagcttggtcttgacactgtgctgtatcctttattccctctgaaatagcaaattcttgtgaacttcacagtaggtggtttgtctgagtagagctttttggttttttgttttttcttatatacccagactgctcacctgcaagctttttggtttttatcaggagactttgtgatcttaagatgtttttctatgacttccagaaaagctgtatccacttctcaggtagtcacagttatagggtcgaagatttttctgtctttggggaatctgcgagttttatacctaagtgatttagttattcttggttgatactttctatggctgcattatcagtggttttgaagtaatgaaagcttttgtagaagtcactactggtcactaatttgactcacgcaattctgttctatgagtaccaacacatgtgaaggaaattttaaaataatataaaagtaggcagagtgcagtggttcacacctgtatccccagcactttgggaggcctaggtgggaggatcactggagcccaggagttcaagaccagcctgggcaatacagcgagacccagtctctacaaaaaaatttaaaaattaactgagcgtagaggcacatgcctgtagcctcagctactcaggaggctgagataagaggatagcttgagcccaggaatttgaggctgcagtgagctacgaccatgccactgtactctaacgtgggtgacagagcaagatgctatctctaaaaaaagaaaaaagaaaggaaaaaaatatataaagtgcacacagtgttcttttgtggccacagaaattgcataagatcctaaaagaggaaccatttttttttaggttaaacagtaaaaaaatatacatttttttactgctgtcattataaggtcaattggtagccaagaatcttccatacaattatttacagtctatgctaaagcaggctttagtgtataagacagtgtataagatagtcactgaattcggtcttggaatattttgttatttgagttatgcttttcctaatgtttgatattatgttcttggaggtaatgcccatagatatattaggactaaaaacacatttaagaaacgtgctgttttctgtggcagagaatgtctctgcacttaagttcctcatttgtaaaaaggagataagcagtatcttactccttcatcagataatacttgtaaagcacagctgcactccttgttaggcacgtgttttgcagaaagaaaaatatatgaagtctgaagacattaggatttggagtcacaagatttgcctgcctctctccttccctcccttcttttttaattccctccctccttcccacccttcctccttccacagatgtttttgagcgccgtctatgtctaggacctgtgttaaatgctacacagtactgtttcctgccctcaaagtataatgttaggggtgttggtgggagaaggtcagacatatagaaagaaaattgcagtggagttttagaaatatgcacagtggctgaacctctaacccagactgagaaggtaaagcaaagcttccaagagaaggtgatgccagagtcatactggaagagaagtaagacttgtcagagaaagaagagggtgaggatgttccaggtaaataggacagcaaatggagttttccacagatggaaaactatgatttcattccgagttgttgtgacacaatgtataaggtcgccaggattagagtaactatcatttataaagttgtaattcagcaaattatttgaagatttctaatgaataggttttaaaaaaagaaaattcagggttgcctgagcataacatgtaatgtgtaagggatactttggtgatgtgttatgttaagtggttggactttatcatgtagaccaagagtctctggatggttggtctgacgtggggatccatgcctgtagtcccagctacatgggaggctcgcttgagcccaagagttcaagtccagcctggccaacatagcaagatcccatctctaattaaaaaaaaaaaaagaggccaggtgtggtggctaacacctgtaatcccagcagtttgggaggccaaggtgagtggatcacttgagcccaggagtttgaggccagcctgggcaacatggcaaaaccccatttctataaaaaaatacaaaaaaagttagccagatgtgctggcacatgtctgtagtcccagctactagggaggctgaggcaagagaattgcttgagtctgggatgtggaggttgcagcgagccgagatcacaccactgtactccagcctgggtgacagagcgagaccctgtctcaaaaaaaaaaaaaaaaaaaaaaaagtagtctctggatggatttcaggggggttgttatatcttccctctgtgtgtgtatgtgtgtgtgagcatgctttttttttttttggaaagtgagttaattgcgaccttcagattttcaaagggatttgtgactcaagaaagggtaatcattgctgttggttctggagggctttaagcagaggtgtgacatgctctgatttgtattttagaaagacacttctggtgtctgtgtagaggatgaatatggggccaacagaactatggcagggaagttgttggcagtagtccaggccagagatgataacgagggcttgaattagggtaatggtgatagagatgtggagctgagaattgctttgagaattatcaagtagtcaaaatgttagctgagcatggtggtgtgcacctgtaagcccagccactctggaggctgaggcaggaggatcacttgagcccaggagattgaggctgcagtgagctatgatcctgccactgcactccagcctgggtggtagagcgagaccctatctaaaaaaaacagtcaaaatataagggttggcaattgcctgggtaatgggaaatgagggagagggaggagtcaaaaatggcttctgggtttctggatcctgtgacactggaggtttgccactgaggaggatttggggagagggaggagagagggagataggaagaggtggggcttagggaggagaaaggtgagttaaatttccatttgagtttaaggttcctggcgggggttacccagatatatagttaaagacacagaaggtatgaattaggaacttgtgagcagatatattcttttttattttatttttattttttgagacggagtctcgctccatcacccaggctggagtgcaatggcgcgatcttggctcactgcaacctctgcctcctgggttcaagtgattctcctgcctcagcctcccgagtagctgggactgcaggtgctgtccaccacgcctggctaatttttgtatttttagtaaagacggggtttcaccatgttggccaggctggtttcgaactcctgacgtcaagcgatccacctgccttggcctcccaaagtgctgggattacaggcgtaatcctggccacgcctggcctattttttatttttatagagatgaggtcttgctgtgttacccaggctggtcttgaatgcctgagttcaagcgaccctcccaccttggcttcccagagtgctgagattacaggcgtgagccactgcacccagcctcaccagcagatagacagtagttaaaattatgagaatttatagagaaagaacattgaatgaatgagttcagagaatgaaaccttggagttacccagtctactgccctcatttaccacaggaagaaaatggggggccgggcgcggtggctcacgcctgtaatcccagcactttgggaggccgaggcgggcggatcacgaggtcaggagatcgagaccatcctggctaacacggtgaaaccccgtctctactaaaaatacaaaaaattagccgggcgtggtggcgggcgcctgtagtcccagctactcgggaggctgaggcaggagaatggcgtgaacccgggaggcggagcttgcagtgagccgagatcgcgccactgcactccagcctgggcgacagagcgagactccgtctcaaaaaaaaaaaaaaaaaaaaaaaaaaaaaaaagaaaatggggcccaaagaggataaatgagttgctcaaattcagttttcaaagctgataactttcagaagagggacttggaactctggtctccaactctttgcctcacagaagagagcttgaaaatgaagtgtcttgacatcctctggtttgtttcatgatgtgtaaaataaagccacaactctttaaagttttagattaatgtcaacttttgttttacttacccccacccccatcccagtactgtcccttcaaagtgtaccactttgagagctctttttcaattccaaagttgtcctcaccgctcagaatgtgtttggaactggattctgggaatttccattaaggttttagaatgaatttttggaaagaaccttaatattgatggtggcaaatttcctttggctttgttcttttgttgagggggcaggggcggacaggtctcactctgtcacccaggctggagtgcagtggcatgatcttggctcactgcaggcttcactttgcgggcttcagtgatcctcccacctcagcctcctgagtagttgagaccacaggtgtgcaccaccacactagggtagtttttgtatttttggtagagatggggctttgccatgttggccaggctggtctcgaactcctgagctcaagtgatcctcctgcctcggcctcccaaagtactgggattataagtgtgagccaccgcatctggccagctttttaaaaagtcaggtttattgaggtacaattttcatacagtaaatttcatcctctttagtatgcagttctatgagtttaagaaacaaatacagtcatggaactgccaccactaccaagatatagacatttccattccccttaaaagttccctcatggtggtgcacagtggctcgaacctgtaatcccagcactttgggaggctgaggcaggcggatcaagaggtcaggagttcaagaccagcttggccatcatggtgaaaccctgtctctactaaaaatacaaaaaattgggcatggtgatgcacgcctgtaatcccagctactcgggaggctgaggcaggataatcatttgaacctgggaggcggaggttgcagtgagctgagattgtgccgccacacttcaccctgggtgacagagacagactccatctaaaaaaaaagttccctcacggcggggcgcagtagctcacgtctgtaatctcagcatttggggaggccgaggcgggcggatcatttgaagtcaggagtttgagaccagcctggccaacatggtgaaaccttatctctactaaaaaaatatatataaaacttagccgggcatggtggcaggcgcctttaatcctagttactcgggaggctgaggcaggagaattgcttgaacccaggaggtggaggttgcagtgagccaagatcactccactgcactccagcctgggcaacacagcaagactccatctcaaaaaaaaaaaaaagttccctcatgcccttctgtagtcaaccctgatccctaccccaagcccctcacaaccagtactctctttcctgttttcattccctttatagaatgtcatgtaagtggaatcttatgatacgtagcctttgagtgtgtttatttcacatagcagaattatcagatttatctgatcaggtgattgttacgtatatcagtaattttttctttctggtgctgagtagtatcctattgtatggataggcctcagtttgtttatccattaaccagcgactggtcatttgtttgcttccagtttttggcaatgatgaataaaacagctataaatatttgaatacaggtttttgtgtaagcataggttttcatttcttttgggtaaatacctcagagtggtattgtattgctgcactggatgctaagtgaatgtttaacctcatgagaaactgccaaactgtttttcaaagtgattgtaccatttgtcattttccccaacaatgtgtgagaattgcatttgctcaaggtcatcgtcagcatgtggtattgtcagttttttggtttgggtttttaaccattctaatagcagtgtagcaatgtgtactgtggcttaaatttgcatttccctaatgactaatgatgttaagcatcttttcatgtgtttaattgtcatcctatattttgtttggtgaagtgtctcccaaaatcttttgcccatttttaaaactggagtgtttgttttattattattgggttttaagggttctttgcatattatggatacaagtcctttttcacatgtatatcatcaaactattttctccagtctgtggcttgtcttcattttttaagaatgttttctgggctgggtgggcagctcacgcttgtaatcccagcactttgggaggccgaggcaggcggatcaccaggtcaggagttcaagaccagcctggccaacatagtgaaaccccgtctctacgaaaaaacaaaaaaattagctgggcgtggtggtgggcgcctgtaatcccagctactcgggaggctgaggcaggagaatcgcttgaacccgggggtggaggttgcagtgagccaagatcgcaccattgcactccagcccaggtgacagtgtgagactctgtctcaaaaaaaaaaaaaaaaaaaggttttggatggctcacacctgtaatcccagcactttgggaggccaaggcaggtggatcacctgaggtcagcagttcaagaccagcctggccaacatggcaaaaccctgtctctagtaaaaatacaaaaattagccaggcatggtggtgtgcacctgtaattccagctacttgggaggctgaggtgtgagaatcacctgaacctgggaggtggaggttgcagtgagctgagattgtgccactgcactccagcctgggcaacagagtgagactccgtcttaaaaaaaaaaaaagaatgttttctgaggagcaaaagtttttcattttggtgaagtccactagtaaaagaaaattaactctaaactgaacactgctttgatcccacctaacccagcttaaatgcaagacatgaaagaacaaagtgctcaccataaatttaattgcatcccagaaaaaagttcaagaatatttaacagaagacaaaaacatccagcaccaggtaaaattcacaatgtctgacacccagttataaatttactagacaaacaaggaacaagaaatatttaacttaaggagaaaaatcagtcacccaaaagggacccagaaatgacatcaaatgtggaattagtgggcaagaaaattaaaacggttattataacaatattccaaatctttctgaatgaggaaagattgtacatgttaagaagagacatagcaaatataacaaattactcaaattgaactactaaggatgaaaactcaattacactggagagaattagtaccagattaaacattgtaggagaaaagattagtggacttggcggcatagcaacagaaactatccaaaatgaacagagcaaaaaagaccaaataacgtaaacagagaattagggaggtacagaacttcaggtcgtcagatatacatgtaattagagtccctaaaggagagaatggaggaaaggaagatgacagtaaagatatgtcaaaaataagggaggaaaattgtcaaaatcggataaaaatgataaacctatgggttcaagaagcccagtgaaactcaaacacatgacttatgacaactacaaaaggctaattatcatcaaattggttaaagccagagactaagagaaaatcttaaaagcatccagagaaaaaaagatacattcatttggcagacttcttgtcatgaactatgtaagtcaaaagacagtgaagaaacattgcaacatctttaaagaactgaaggacgctttgggaggctgaggcaggaggattgcttgaagcaaggagttcaagaccagcctgggcaacatagcaatccactgtctctacgaaaaataaaagaattggccaggcatgatggtgtgtccttgtagtcaaagctacttcagaggctgaggtaggaggattgctagagcccaggagttcaaggctgtagtgagctatgatcatgccactgtacttcatcctggacaacagagcaaaactaataatataaatgtgtagttctatatccaaaaataaaacactttcaaaaatgaagagaaacaaatagtttttcagatgtacaaaaactgaaagaaacaatcactaccagactggcacaataggaactgttaaagaaagttcttcagacaggtgggcatggtggttcatgcctgcaatcctagcactttgggaggccaaggtgggcagatcccttgaggtcaggagttcaagaccagcctggccagcatggtggaaccccatctgtactaaaaatacaaaaattagctgggtttgattgtgcaagtttgtaattccagctactcgggaggctgaggcagaagtattgcttgaacctgggaggcggaggttgaagtgagcagagatttcaccactgcactccagtgtgagtgacagagcaaactccatctcaaacacacacacacacacacacacacacacacacacacacacacacgagttcttcagacagaaggaaaaataatacaaaatgaaaatctggatttacacaaaggaatacaaaatagtgggaatggaaactatttgagtaagtatagcctttttttcttattgtttaaatctctttaaaagacaattcactgtttaaagcaataataataataatgtcttgtggggtttatagcttacgtagaagtacagtgtatgtcagcaataccacaaagcctgaaagaaatgaaacggaaatatgccagtgtaaggtcctagtattagatacgaagtaatgtaacatcacctaaaggtagactgtgttatggtaaacatgtaatactatgaaccttaaatcgactactaaaacaaaacaaagcattatagctaataatccacaaaaggaaataaagtggaatcatttttttaaaagctcagttattcccaaaggaggcagaaaaaagagaagaaagaataaaaaacagaagggacaaatggaaaacaaagaacaatatagtagatttaaatctgatcatgtcaatactttctgtaagttaaaatgatctaaatatcataattaaaaagcagaagtttcagatttggctaaagaaaagtaagacccaactatatgcatcataaatgaaaccagtcctggatatttttttaatgtaattttttatttaaagaaggggtcttgtcatgttacccagactggtctcaaactcctgggctcaaatgatctgcccacattggcctcccgaggtgctgggattgcaggtgtgagccaccatgcccagccctagtcctgcatatgaagacacaaataggttaaaagtaaatggatggggaaaaaaatcccattctaacactaatcaaaagagagccagaggtaatgatgttagacaaagtacatttcagagaaaagaatattgctagaaacaaagagagccatttcataatgttataaggcttgattcatcaaaaggacataacaatcctaaacgtatgcacctaataacagaacttgaaaatacatggggcaaaatctgactgaactgcaaggagaaataaacaaatacacaattatattcaaagtgtatgacactccttctccttcaataattgatagaacaaggacaaataaataagtaggatatagaagacttgaacagcattgtcaagcaacttgaccacatcacatttatggaacattccacctaacaatagtcacagtagtcaaatgcacctcttttttcttttctttttttttttttttttttttttttgagatggagtctggctctgttgcccaggctggagtgcagtggcacaatcttggctcactacaacctctgcctccccggctcaagtagttctcctgcctcagcctcccgagtagctggaactataggcgtgcgccaccaggcccagctaattttttgtatttttagtagaaacagggtttcaccacgttggccaggctggtcttgaactcctttctcaggtgatccgctcgtgtcggcctcccaaagtgaggtgtcacaggcgtgagccaccgccccggcttgcacatcttttcaggtgcacacttaccaaggtaaagcatattctgaaccataaaacaagtgtcagtgaattttttttttttttttttttagaggaaggctcgctctgtcgcccaggctggagtgcagtggtgcgatctcggctcactgcaagctccgcctcccgggttcacgccattctcctgcctcagcctcccgagtagctgggactacaggcgcccgccaccacgcccggctaattttttgtatttttagtatagacggggtttcaccgtgttagccaggatggtctcaatctcctgacctcgtgatccgccctcctcggcctcccaaagtgctgggattacaggcatgagccactgcgcccggctgtaaattttaaaagattcaatacatacaaagtatatcttctgactacaatagcattaaattaaaatttcagcctgggcaagatggcaaaaccccatctctacaaaaattagaaaaaaataattagccaggttggtggcaaatccccatctctacaaaaattagaaaaaaataattagccaggttggtggcatttgcctgtactcccagctacacaggaggctgaggtgggagaatcacctgagcccagggaagttaaggctgcagtacaccgtgatcacaccactgcagtccaccctgggtgacgagtgagactcaaaacaaaaaacaaacaaaattaataactgcaggacatttttgtaaaaaaataaaaaattaattaattaaaattaataacagaaagaggccagtacagtagcttgcgcatgtaatcccagcatttttggaggctgaggtggcaagatcacttgaggccaggagttcaagaccagcctgggtaacatagcaagacctcgtctcccaaaaaataaaaaaaaattagggagacgtggtggcctatgtctgtagtcctcactagttgggaggctgatgtgggatgatcatttgagcctaagagttcaagtccagccaaggcaacacagcaaaacaccatttcttttaaaaaaaagaaaaaaagtaagcaaaagaaaggaaacacagtaataatcatcagggtgaaaaatcaaagaaaaagaaaacaaaaaaattagaaattaaaacaataaaactaagaacagtaaaagatcaataaaatcagtaaacctctagccaaactgattagaaaaaaagagtgaagacgtgaattgccaatatcaggaatgagagaagtagtatcactacataatctacagatattaaacggttaatatggaaatattactaacaactttatacctatactttgacaactttgattaacagaaaaaaaataaaagacacatactatcaatgcttgttcaagaaaaattgataagctaaataatgctctactaaagcaatttaatctgtagttaaaaatattcccacaaggaaaattattagagcagatggctctcactgggaaatccaccaaacatttaaagaggaaataaaaccaattctatacagactcctccagaaaactgaagagaaggcgacacttctcaactcattctatgaagccagcattactctaataccaaaaccagacaaaggttaaaagaagggtatagatcaataacttccatgagtgtaaatgtaacaatccttagtaatattttaacaaattgaattcaatgatatataaaaaagataacaggtgatgtcccgctgatgtttattccaggaatgcaaggttggttaacatttgaaaatcaatcactatatttacagactaaaaagaaaattattactaaaaaaaaagaacaaaaccaagtctatctgattatctcaatagatacagacaaagcatttgacaaagttcaatatccattactgacaaaaacctcttagcaaactaggcatagaagtgattcggctgggcacgtggtggatcatgcctgtaatcccagcactttgggaggacaaggtgtaaggattgcctgagctcaagagaccaacaccagactgggcaacatggtgaaacttcatctctacaaaaaatacaaaaattggccaggcgcggtggctcatgcctgtaatcccagcactttgggaggccaaagtgggcagatcatgaagtcaggagatcaagaccatcctggctaacacagtgaaaccccgtctctactaaaaatacaaaaaaaaagtagctgggcatggtggtgggtgcctgtagtcccagctactcgggaggctgaggcaggagactggcgtgaacccaggaggcaaagcttgcagtgagctgagatcgcgccactgcactccagcctgggcgacagagcaagactccgtctcaaaaaacaaaacaaaacaaaacaaaacaaaacaaaacaaaacaaaacaaaaattagctgggcgtcgtggctcctgactgtagtcccagctacttggaagcgtcccttccaaggttggaggatcccttgagcatgggaggtggaggttgcagtgagctgagatcgcaccactggactccatcctaggtgacacagtgagatcatgtctcaaaaaaaaaaattcctcctggagtgagcagcagaaaaaacaaaaaataaaagactaggcacagtggctcatgcctgtaatcccagtgatttggcaggacgaggcaaggggggttgcttgaggctaggagtttgagaccagccttggcaacatagcaagaccccatctctacaaaaagttaaacaattttttaaaaattagctgagtgtggtggtatgtgcatgtagtcctaggtacttgggcagctgaggtgggaaaactgtttgagcccaggagttcagtgttggagtgagctatgataatgcctctacactccagcctgggcgacagagcaagatcctgcctataagaatcaaagtaggccggtgcagtggctcacgcctataatcccagcactttgggagggtgaggcaggcagatcacctgacgtcaggaattcgagaccaacctgggcaacatggcgaaaccctgtctttactaaaaatataaaaattagccgggcatgatggtgggcacctgtaatcccagctactcagaagctaagggacaaaaattgcttgaacccgggagatggaggttgcagtgagccaagatcgcaccattgtactccagcctgggcgacagagcaagactgtgtctcacaaaaaaaaaaaaaaaaaaaaaaaaaaaagaatcaaagtaaaaaaatcaaagtaaatcaaagtaaaaattataataaaaatattacagaagagaaaagaacttatcttcctcaagctaattaagggtatctatgaaaaaccaatagctaatattatacttcatagtaaattaataaatcttttccctaagatcagaaacaaggcgaggatatccactcttcacttcttttattcaactttatactgcagattttagccaacgtattaagacgtgaaaaagaaatgaaaagcatccagattgaaaaggaagatgtaaaactctttatttacagacaacatgataacctatgtagaaaattctatagaacctacaaaaagtgactgtaactaataagtgagttctgtaagtttgcaggatgtactatcagtgtggaaaaaaattaattatctttctatgtcctagcaactaacaatcagaaattgaagggaagaataccaaaatagtatccaaaaatatgaaacagggagaaagatgggcaagacccataatgaaaactataaaacattgataagagaaattaagtaagatctaattaaaaggagtgatatgccatatttatgtattagaaaactcaatattgttataatgtcagttttgcccaaattgatctagtgattcagtgaaattccttttaaaatccctgtagatctttttgcagaaattgacaagctgattctaaaattcatatggaaatgcaagagaactagaatatccaaaacaactctaaagaacaaagttagagaatttgtagtagattccaaggcttattataaagcagtagtaaccaagacaatgtggaattggcatccagatagacaaacagattaatggaacagtatagtgatttgcgacctagaaactgaccaaaaatatatggtcaatttatttttgataaaggtgtaaaggtaattcagtggagaaatcagtctttcaacaaatggtactggaacaatggcatattcatgtgcaaaactttgatccatatgtcataatgtatgaaaagttaattgaaaatggatcatagacctaaatataaaattaaatgtaaatatgacttctaggagaaaacctttctgatttaagattaggtgaagattttttagatacaaagccaaaagcatgatccataaaagaaaaattgataaattggacatcttcaagattaaaaatttctgatcctctaaaaacaagccacagactggcagaaaatatttgccaattacataagtgataaaggacttgtatccagaatatatataattttaacctctcaaaactcaataatacaaagtttcagttaggagggtaagttctggatatctattgtacagcatgatgactatagctgataataatgttgatatagtttggatattttttgctctaaatctcatgttgaaatttgatccctaatgttttatttatttatttatttttgagatggagtctctctctgtcaccaaggctggagagcagtggtgcgatctccaccaactgcaatctccacctcctgggttcaagcaattctggtgcctcagcctcctgagtagctgggattacaggaatgcgccatggcgcccagctaatttttgtatttttagtagagacggggtttcaccattttggccaggctggtctcgaactcctgacctcaggtgatccacccaccttggcctcccaaagtgctgggattacaggcatgagccaccgtgcccggccagatccccagtgttttagatggagcctagtgggaggtgtttgggtcctgggggtggatacctcgtgagtggcttgatgtcatcctgtgggaatgagtgagttctcattttactagttcctacaagacatgattgtgaaaaagagcctggcatccccctcctctctcttccttcctttctcactatgtgatggctgctccctttccccttctgtcatgagtggaagtgatatggtttggctgtgtctccacccaaatctcaacttgaattgtatctcccagaattcccacatgttgtgggagggacctagggtgaggtaattgaatcgtgggggctggtctttcccgtgctatccttgtgctagtgaataagtctcacaagatctgatgggtttatcaggtgtttttgcttttgcttcttcctcatttttctcttgctgccaccatgtaagaagtgcctttcacctcccaccatgattttgaagcctcccagccatgtggaactgtaagcccaattaaacccctttttcttcccagtctcaggtatgtttttatcagcagcatgaaaacagactaatacagtaaattggtaccagtagagtggggtgctgctgaaaagatacctgaaaatgtggaagtgtctttggaactgggtaacaggcagaagttggaacagtttggagggctcagaagaagtcaggaaaatgtgggaaagcttggaacctcctaaagacttgttgaatggctttgacaaaaatcctgatagtgatacgaacaataaggtccaagccgaggtggtctatctgatggagatgaggaacttgttgggaactggagcaaaggtgatgactcttgttatgttttagcaaaaagactggaggcattttgcccttgtcctagagatttgtggaactttgaacttgagaaagatgatttagggtatctggctgaagaaatttctaagcagcaacacattcaagagatgacttgagtacttgtaaaggcattcagttttgtaagggaagcagagcataaaagttgggaaaatttgcagcaggattatgcaatagaaaagaaaaacccaggccgggcatggtggctcacgcctgtaaccccagcactttgggaggccaaggcggggggatcacgaggtcgggagttcaagaccagcctagcaaacacagtaaaaccctgtctctactaaaaatacaaaaattatctgggcatgatggcgtgcacctttagtcccagctacttgggaggctgaggcaggagaatcgcttgaacctgggaggcggaggttgtggtgagccaaagtggtgccactgtactccagcctgggtgacagagtgagactgcatctcaaaaaaaaaaaaaaaagaaaagaaaaacccattttctggggagaaattctagctgctgcagaaatttgcataagttgcaaggagcctaatgttaatccccaagaccatggggaaaatgtctccaggccatgttggagaccttcacagcagcccatcccatcacaggcccagaggcccaggagaaaaaagtggtttcatgggctgagcccaggatccccatgctgtatgcagccaaggacttggtgccctgtgtcccagcagctccatccatggctgaaagggaccaatgtacagctcaggctgtggcttcagagggtggaagctacaagccttggcagcttccacgtggtgttcagcatgcgggtgcacagaagtcaagaattgagatttgggaacctctgcctagatttcagaagatatatggaaaagcctggttgccctgagaaaagtttgctgcaggggcagggtcctcatggagaacctctgctagggtagtgtggaagggaaatgtggggtcggagcccccacacagagtccctgctgaagcactgcctactggagctgtgagaagagggccactgccctccagaccctagaatggtagatccattgacagcttgcaccatgtacctggaaaagctgcagacacaatgccagcccatgaaagcagccaggagggaggctgtaccctgcaaagccacaggggcggagcttcccaagaccataggaatccacctcttgcatcagcatgccctggatgtgagacctggagtcaaaagagatcattttggagctttaaaatttgactgccttgctggatttcagacttgcataggccctgtaacccctttgttttggccaatttctcccatttggaacagctgtatttacccaatgcctgtacccccattgtatctaggaagtaactagcttgcttttgattttacaggctcataggtggaagggacttgccttgcctcagatgagactttggactgtggacatttgggttaaggctgaaatgagttaagactacgggggactgttgggaaggcatgattgattttggaatgtcaggacatgagatttggaggggccggggcagaatgatatggtttgactgtgtcaccacccaaatctcaacttgaattgtatctcgcagaattcccacgtgttgtgggaaggacccagggggaggtaattgaatcatgggtgccagactttcccatgctattctcatgatagtgaataagtctcacgagatttgatgggaataagtctcacgagatctgatgggtttatcagggggttctgcttttgctgcttcctcatttttctcttgctgccaccatgtgagaagtgcctttcgcctcctgccatgattctgaaacctccccagccatgtggagctgtaaatccaattaaacctctttttcttcccagtcttgggtatatttttatcagcagtgtgaaaacggactaatatatgaagcttcctgagttcctcaccagaagcagatgctagcatcatgcttctcacacacactatgtaactgtgagccaaataaaactctcttttcttttgttttctttttctttctttcttttctctttctttctctctctctttctttttctctttttctttctttctttcttttctttcttctttcccttccttccttcctctctctctctctctttcttttccttccttccttccttcctttctgtctgtctcttccctcccttcctccctcccttccttctttccttccttccttccctcttgctctgtcacccagagacagggtctcactctgtcatccaagctgaagtgcagtggcatgatcacagctcactgcagccttgacctccctgggttgaggtgatcttcctgcctcagtttcctgagtagctgggactacagatacatgctaccacacctggctaattttgtattttttgtagagacagagtttcactgtgttgcccaggctggtctcgaattcctgggctcaagcaatcctcccaccttggcctcccaaagtgctgagattacagtcctcactcatgctacaaacactgccttctctctgccttctggagtagaacaccttttctcctcctgcctttggacatcagactccaggttctttggctcttggactctgacacttgcaccagcagccttctgggggctctcaggcctttggcctcagactggggttgcattgttggcttccttggttttgaggcttttggtcttggactgggacacgttactggcttttctttctcattttctggcttgcagaccgcttgtcctggaacttcgcctttgtaatcacatgagccaattctctctaaaaaattccctttcatatacaaatatatgaaatatatgtatatatatcctattggttttgtccctctggagaaggctactacaaatgtattgtgtaaaatgaaataaaataaacgtcagcatttgattatgttttgtaatatattttctctttttggggccattgtaggtacttaatatttgttaattgcatggatggatgaataaataaatgtcaaaatgctcatattttaaaaatgcattgtatatgagaaaattgctatgaagggccatgtgcagtggctcacgcctataatcccagcactttgggaggccgaggcggacagatcacttgaagtcaggagttccagaccagcctggccaacatgggggaccctcacttctactaaaaatacaaaaaattagccgggtgtggtggtgcatgcctgtaatcacagctacttgggaggctgaggcaggaggatcactggaacctgggaggtggagtttgcagtgagccgagatggtgccactgtactccagcttgggtgacagagtcagactctgtctcaaaaaaaaaaaattgctaagagagtaggttttagatgtctcaacatgaaaaaataaatacatgaagtgatgcatccatttttttttttttagacagagcctcactctgttgcccaggctagagtgcaatggcgtgatccctgctcactgcaacctctacctcccaggttgaagtgattcttctgcctcagcctcctgagtagctgggactacaggcatgcgccacttcacccggctaatttttgtatttttagtagagacagggtttcaccatgttggccaggctggtcttgaactcccgacctcaagtgatctgcccacctcggcctcccaaagtgctgggattacagatgtgagccaccatgcccggccttgtgatgcatctattttttattgatacataatattttacatatttatggggtacatacgatattttgtgacctccatagaatgtgtaatgaccaactcagagtatttgaggtaatcatcacgttgaatatttatcatttctatgtgttgggaacatttcaagtccaagaaatatatgaaatatatgaaaaaatgttcaacatcactaatcatcagggaaatgcaaatcaaaaccacaatgatgtatatgttaattagcttgatttaatcattccacaatgtatgcatatattaaaacatcacattatactccgtgagtatatatttttgtcaattatacaatactcaatactttttaaaatgagcaatctcattaaaaaaggttagatgtgggcaaaagatgtgaacagatacaccaccagagaagttatggaatgtgatagcatcatctaaatggatgttcaatgttcattagtcaggaggaaaatgcaaattaaaaccacaatgagggctgagcgcagtggctcacacctgtaatcccagcacttgaggagcccaaggtgggcagacaacttgagcctaggagtttgagaccagcctggacaaaaaatacaaaaattacaaaaatacagaaattagccaggtatggtggtgcgcaccagttgtcccagctactcgggaagctaaggtggggggatggcttgagcccaggaggtcaaggccgcagtgagctgtgatcacgccactatactccaacctgagtgacagggtgagaccctgtctcaaaaaataaaaaataaaaataaataagaacacaatgagatacaacacacttattagaaaggccaaaattttaaagtctcatcataccaaatgttagcgaggatgtgacacaactggaattccatacactgcgagtgggaacataaaagctctaacctctttggaagacaattgggcactttcttaaaaagttacaaatacactgaccatataacctaggcattcaattccttagtatttacccaagagaaatgaaagtatatatccatattaagacttttatataaatagcagctttattagtaacagcaaaagtggaaacagcccaaatgtgtgtccacaggtgaatagattaaaacaaattgtgttatatatctatacaacagattactacttggtaattaaaaggaatgaactactgatatctactacagtatggacaaatatcaaaaaaatgcacaatgaaagaggccagaccacccaccctataaaaaaacagttcatactgtgtgattccatttgtatgaaattttagaaaattcaaaccagtctataattacagaaaatagatcagaggtggcttgggtgtgggggaatggggttggtagcagggcgtgatatcaaagcttcataaggaaacttttgagagtgataggtaactttactatcttttaaaaaaaattgttttcttttttttcttttcttttttttttttttttagaggcaggatctggctcttttgcccaggctggagtgcagaggcgtgatcatagctcattgcagcttcaaactcctggcctcaagctatcctcccacttcagcctcccaagtagctgagacttcaggctcgtgccaccacacttggctaatgttttaaaaacaaatttttgtagagatggggtttcactctatctctcagcctggtctctaactcctggtctcaagtgatcctcccaccttggcctcccaaagcgctgggattacaggtgtgagcatcatgcccagccttaaattcaccattttgattgtggtgatggatttgcagatatgtatgaatttactaaattgtatacttttaatgtgcacgatttattataagttaattatacttataaaatattttttaaattactatttttttaaagactagagagaaaacattacagagtggagcaggaaaagttcttactttctgagactgtctcagattatgagattacaaagatggctggacacatatattacctcctgtcgctatctacagaccactcaagtgacagtaaaaaatgctttttttttttttttttccagagatgaggtctcactgtgtcacccaggggctggagtgcaatggtgcaatcacatctcactgcagcctcaacatcccatgcctgagcgatcctttcccacctcagccttctgagtagctgggctgggactataggcgcacaccactatgcccagttaatttaaaaaaaatttttagagatatgcttttactgggttgcccaggctggtctcaaactcctggcctcaagcaatccacccacctcagcctcccaaagtgctgggattacagacatgagccaccaggctcggccaaaaaatgcttttaaagagataagcatatttgttgttgttgttttttttttttagagacggagtctcgctctgtcgcccaggctggagtgcagtggcacgatcttggctcactgcaagctccgcctcccgggtttacgctattctcctgcctcagcctcccgagtagctgggactgcaggcgcctgccaccacgcccggctaatttttgtatttttttaggtagagacggggtttcaccacgttagccaggatggtctcgagctcctgacctcgtgatccacccgcctcggcctcccaaagtgctgggattacaggtgtgagccaccacgcccggccgcatatttgttaagagaatagatcttggccaggcacagtggttcatgcctgtaatcccagcactttgggaggccaaggcagctgaatcacttgaggccaggagtttgagactagcctggccagcaaggtgaatgctgtctctactaaaaacacgaaaattagctgggcatgatggcgcacacccgtgatcccagctacttgggaggctgaggcaggagaatcactcaaaccccggagacagaggttgcagtgagcagtgatcgtgccactgcactccagcctcggcaacagatcaagactctgtctcaatttaaaaaaaagagagagagagagcgagagagagtagatcttaaatgttctcatcaccaaaaaagaaaaagaaaaagataagtatacaagctgatggataggttagttagcttgtttggggtattcgtttcacaatgtgtgtatgtatatgtgtatatacttatatgtacatatatacttaaatacataaagagaagcccatatatatgtatatatacttaatatatacatatacatacacacattatatataaatacacatatatttttatatatatatgaaaattacatgatgtacactgtgaatatatgatgtacactgcaatttttatttgccaattatacctaatacccccaaagaaacaaagatataaacatagaaagacaaagagggtggagaaggagaaagtaaaactttgagagctttaaagcagataaagctgggtgtagtggctcacacctatcatccaacaacttgggaggccaaggcagggggatcacttgagtccaggagtttgaagtcactgtgtgcaacatagcgagatcctgtctcttaaaaaaaaaattaaaaagaagaagcagatgatgaaagctgaattatagttgggggttgagaaagctgagaagcagcctgcttttcattgcaggaccccacaatagtataacttgccaagaccagctcgcaggacacaggcagcaagcaagagagagaatcttctctggggagtcggaccaaccggtgagaaaagacctaaatatacacctacagagattgagccacaagccacatcatagagcttaggatagacgctcagcacttcattcttatatgtgaagagactgtcaaagattgtcagtcatttggggaaaatatctaaatcatgggcaaacagaaagtaaagaggagagaaggaatcaaagaaataattcaagaaaatgccaaacagagggatatgaatttctagattgaaaaggcccactgagtacccagcacaatggatgaaaatagactctcaggaaggcacataattttgaaaattttagtgctgtggtttcaaagaaaagattctataagcacccatagagaaaaaaagaatataccaggccgggcacagtggcttacacctgtaatcccagcactttgggaggcagaggcgggtggatcacctgaggtcaggagtccaagaccagcctggctaacgtggcgataccccgtctctactaaaaatacaaaaaaaaaaagaaagaaaattagccaggcacggtgacgggcacctgtaatcccagccactcgggaggctgagacaggagaatcacttgagcctgggaggcggagcttgcagtgagccaagaacgcgccactgcactccagcctgggcgacagagcgagactccatctcaaaaaaaaaaaaaaaaaaaaaggtagaaatctatatacaataaaaagtgcacacacacacacacacaaatcatgtatacaaataatcatttcctcagtcaaactagcctcatttcaaaagcttaagagccacatgtagctagtcgctaccatattagacagcacaggcatagaacatgtccatcactgcagactgttttattggacagccctgctctaagtatctctgctcctgatttaaactagactaaacttgcataaaatcaaatttcctacatactttcatagtggccaatttcctctgattacactttgttttgttgtttggttgcaagataaatgcatgttttctttttaaggtgtgcatgtatcaacattatcatttttattttgttttacagttgttttttctgcaatgatatttgggactattacaaatcaagatctgcctgtgatcaagtgtgttttaatcaatcataagaacaatgattcatcagtggggaagtcatcatcatatcccatggtaaagtaacattaaaattatacctttagctgtttttctctagagaacgtaatttgtaagttattgaagcctaccatggctaaatgggcttctctttatgtatttaagtatattatggcctcacatctggtaccaacagagcatctatactcctagctccctggcactccattccttcaagaaccgtattcttcatatgaggatttaggaaggacactgattgataactagcatgaagtaatgagtagagtcgtcccttggtatacagcggggatggttccaagactctcactaataccaaaatccatggatactcaagtacctgatataaaatggcttggtatttgcatgtaacctatgcagattctgtatatttttgagacagtctcattctgttgaccaggctggagtatagtggcatgatcatagctcactgcagcctcgccctcccgggctcaagcaatcctcccacttcaacctcccaactagctgggactaaaggcacatgccaccacacctggctaattttttttattttttgcaaagatggggtcccactctgttgcccaggctgatcttgaactcctgggctcaactgatcctaccacctaagcctcccaaagtgctgggattacagtcctcagccaccatgcttgaccctcctgtatacttttaaaattatctctagattacttataatacctaatacgatgcaaatgctttataatacctaaacaactatgtgaatagttattataccctattgtttagggaataatgatgacaagggaaaaaagtcggtacatgttcagtacagatgcaaccccatttttttcggaatattttcaatctgtggttggttgtatccatggatgcggaacccatggttacagagggcctactgtatttccttttctccttaaagagaatcctggcttttcttccaagcctgaatccctcacttccagctgcccccagtatataggtagattttccatttgcacatcaaaatccacctatgtcatttattttatttcatttctatttccccaagcctgctcttattcttgtatttattgatttctgtttatacccctgtttagttcccaggcttgaaagctcagcatcattttggactactttctttctattactttcacatttggtcagttaccaagtgttgtcgatcccctttaggagttctcatataatcatctcatattctctagtctcactgccacttccctaagtcaagccctcgttaactccctcataatcacagtgatatcctaagtggcctcttcctgctacaattcatctcagaggtagctgctgggctagcctccctgaagcaggcacatccttcattgcctggctctgaaccctccatgatttcccattacttagactgataccaagattgctcagtaatctggctctggctccttcaagttccgactttgtttttcatgactcctctcttttacgctgttcgtcttgtttttcattaccccctctcttgtgctattcctacccctctattttaaaaacatatatttagtaaatttactcaagggaagcttaagtgatggagaactgaaaatagtagaaatcagccaggtacagtagctcacacctgtaatcccagcactttgggaggccaaggtgggtggatcgcttgagctgaggagtttgagaccagcctgaggaacatggtgaaaccccgtgtctatcaaaaatacaacaacaacaaaaaaattaaccagccatggtggtgtgcgcctgtggtcccagctacttgtgaggctgaggccggaggatcatctgaaccagggaggtggaggttgcagtgagccaagattgtgccactgccctccagcctgccttggcctcccaaagtgttgggattacaggcatgagccactgctactggctgatatatatctcatatatatatatgatatatatcatagattttttttttgtagagacgggttttgccatgttagccagatgggtctcgaactcctgacctcaggttatccgcccaccttggcctcccaaagtgctgggattacaggcatgagccactcactgcacctggctgggaatcgcgtttcaacatgagctttggaggggacacacatccaaaccatatcaccaactattccatattcttcaaatttgcttttaagagatgactatactaaggcaccaagtattcacagcagctgagtgagatgtactgttttttttttcctgtcagtgattagagagcataggcaggcaatccaccataactctaaaattatctctccttaccaaataggttcatttatacctcccttcctccagaaagtcaaagctgcatttaatgtcacattcctcctgaacagatcttgtgccattgcggcacagtctaaacaaaacaaaacaaaacataataaaaacaaaaataataaaaacaaaaagtctccactatggtttaatgactggttttctctttgtgaagaactgaagttactggagttgaccaaatgtgtttgacaatcatgacctcatatttcaggcaggtggcctgcacaagccagcttattttctttatttgccatgtcccaccctgtacttctagagaatgagttgttgatttgtttgtttgttggttggttttctgtaacaaggatttgggaaagaatggtggactttgtgtgatggatcattttacgtgctttctctggacttttcacagcttgtgcagctgttttacttacgtaagcagacaacaactgtgttagtgatttcatgtcctcattagttagctatacttgttataagaagatcaacagactgaatttcagtgttattacaaaagttgtatttttttttaacattgtgattttgagatatcacagtctcttaaattccagtgccttcatggctctgtgggactcagctctgccaggtggtgaagaacgtggcctggccttcaagaacatcccttggctcctggtcagcctggctcaagctattcccggactgccagcggtggagcccactgcctctgtactgtgcatttatcatgctattctctctcctctgaagcccgcagatttgtctatccagattgtggattgtacccagctttaatttttaaaaactttttacaggggctgggcacggtggctcacgcctgtaatcccagcattttgggaggcccaggcaggtggatcacctgaggttgggagttcgagaccagcctggccaacatggagaaattccgtctctgctaaaaaatacaaaataaaccaggcgtggtggcgcatgcctgtaatcccagctactcaagaggctgaggcaggagaatcgcttgaaccccagaggcggaggttgcggtgagctgaaatcatgcattgcactccagcctggcaacaagaacgagattatggatttctggcaagaatttcccaggagcgtgcccttcccagagcatcatattcagagtgacaggaagtcatttggtgtcattatgaagatgtgaaccttgatcattagagttagacagtgcatgccaggtatccccactgcaaagttactattttcttcacttataattaataagtgtcttggaggggatgcaaatatcctgttccttctttaattttcacctactgattttagcacccattggtggatcttgcctacgattattatggtggtgtttgcctaatggtgcttttctttttcctacattccctctatgttaattggaatgctttgtaaggaagcactgcccctttcccctcattttatttatgtatttattcaattttttatttatatcagtagaggcccatgaatatttattttatcctctggattgtaacccaatacaatcattatttattttgttgctcaaattcttccagctttggccattaggaactacttcagttttgctcctgtgtcctttcaacatctcctcatctttttccaagcccttccttaatttttgacacactaccagatagttcaggttcatcttgtatttttcttttcttgccttacccctggaattcagcacttctccaaagagcactggcttctctggggggtagtatttaggaaccaagatctgagagttgggtgtgcccattgctgctgggatatcattgcttctaggccctctcggcaggcagagcctggaaatacaatatatagataatctaattttagaattactaacccataccctggtgagaaatagatttactaactaaaggacagtatttgtgtacagtgctttttgtctttagccttaagggatccaaagtattattttctgaagttacttaggttagttcctttctttcccatcccttcactatggtgttattatttatttgtgatacaattgaattaatttggttcgtattccgtcttgatatttcttccagccccctcatttcacatattctagttggtttatttatttattttatttattatatattcttttactagagacagggttacaccatgttgccaaggctggtctcgaactcctggactcaagcaatctgcctgcctcggcctcccaaagtgctgggattacaggtgtgagccaccacacctggattattattattattattattattactttgagacaagatctcgctccgttgtccaggctggagtgcagtgacacaaacatagctcacttcagcctcaacctcctaggctcaagcaatcctcctgcctcagcctcccaaagtgctgggattacaggcgtgagccaccacacctggattattattattattattattattattattattattactttgagacaagatctcgctccgttgtccaggctggagtgcagtgacacaaacatagctcacttcagcctcaacctcctaggctcaagcaatcctcctgcctcagcctcccgggtagcaaggaccacaggcatgcaccaccatgcctggctaattttttaattttttgtagagatggggtctcattttgttgcccaggctgatcttgaactcctgggctcaagtgatcctcttgccttggcctcacaaagtcctgggattacaggcatgagccactgtgcctgaccctcctggttggtttaattacttgttttttgagacatgacatgactcttgtcctaaaagtcaaaacaatgtgaaacagtatactcagagaagtatcactgtctcctcactcctactgacaagtttccaccctctttctacatatccctgtaattaaccaatccctttagatgttttgctattattccagtatttattgtgcacaagtgaccagatacatatatatttccttatattctcctctttcttacatagcatagcatacttgaaggtagatactttttgcacctagctttcttcacttaacagtacatccaggaaatcattgcaaatcagttcttagaggttgtcttcattcttttttatagctacatagtaccccctggtgtggatgtaccataatttgttcaaccactcatctatgtacgagcatttaggttgttttcagtattttgcaattatgaattgtgctgcaattaattgctagaggtgtgcttattcccagaagtgagattgctggctcaaatggtgagtgaatcgcaagttttattaggtattgccaaattcttctccagaagggttgtgcagggtgtgttcccccagcaatgcaggagaaaactgtttccccatggcctcaccgacaaaatgtgttgtcatattttttaattttttgccagtctgatagaggagaagtgatatattagtcttgttttaacttatggatttctaattataagtaggtttaatattttctcatatgcttgagggccattcttttttttctttttttgagatggagtctcactctgtcgcccaggctggagtacagtagtgccatcttggcttactgcagcctccgcctcccaggttcaagcagttctctgcctcagcctcccaagtagctgggattacaggtgcctgccaccacactcggctaatttttatatttttagtacagacagggtctcaccatcttggccaggctggtctcgaactcctgaccttgtgatccgcccaccttggcctcccaaagtgctgggatttcaggagtgagccatcgcccctggctgagggccattctttatatcttttttcttgaattgtgtattcaattctttttcccagttgtctactgtgttttggttctgtgtccctcaattttcaaaggttctttttatattaggggtattcgccctttacttgtaatatatgttggcatattttcttctagtatgtcagctgggtttttttgttttgggacggggtcttgctatgttctccaggctggacttgaactcctgggctcaagtgatccttccacctcagcctcctgagtagctggaactacaggcatgtaccaccatgcttgacttgtctattattttttactttatcttgtgcccatcttttatgatccagctcaattactggacttgggtgaaaaacttaaacatccggcttagaaatctcttctccctcctttgaagttccagggcacttacaatttacatttcaaagtatttggtatctttttatgggacacttgtatttctcctgtgttttacttatttattcctaggagactcaaactctttaagggcaagattagtcttttttttttttctagtctcatagtactcagcagatggtcttgcacttatcatagtaagtgaacaaataagaccagaaatatggtttttgactggtagcagaagagctaccctgctcttcacctgaagaaatatgtgtgtgctcatgtgtgtgcatgtgtgcatgctgtgttcagccatgtaaaggagataggaggtgggggactccacagcagaagctgctccaacccctgctgtcaatatatcttaattaattaattaattaattttttgagacagagtctgactccgtcccccaggctggagtgcattggcgggatctaggctcattgcaacctccatctcccaggttcaagtgattctcctgcctcagcctcctgagtagctgggattacaggcgcctaccaccacacccagctaattttttgtattttcagtagagatggggtttcaccatgttggccaggctggtctcgaactcctgacctcaagtgatctgcccacttcagcctcccaaagtgctggaattacaggcgtgagccatagcgcctggcctcatatatctcaattatttaaagcaggcaagaagtgtggtggcagtgtggctatggggacatctgcccagaaaatttggtttttaaatttcctctaacacagataccaatttaccattgctttataaatttttatctatataccaacaatcacaaaaatatttacctatatattatagattttataattacggtctgattagtttgctaggggtgatacaacaaactaccacagactgggcaactgaaaccaacagaaatttattatctcacaattctggaagctagaagtccaaaattaagatgtcagcagggttggttccttctaagggcagtgagcaagaatctgctccaggcctctctccttggttggaagatggctgtctttctgttcacatggtgttcttactgtctgtgtatctgccttcaaatctcctcttttttttttttttttgagacagagtttcactctgttgcccagtctggagtgcagtggcgcgatctcagctcgctgcaaccgctgcctcccatgttcaagccattctcctgcctcagcctcccgtggagctgggattacaggtgccaaccaccacttccagcttattttttgtatttttagtagacatagggtttcaccatgttggccaggctggtcttgaattcctgacttcaagtgatctgcctgcctccgcgtcccaaagtgctaggattgcaggtgtgagccaccgtgccctgcctcctcttcttataaggacacgagtcatactggatttaggcccaccctaatgacccattttaacttgattaccactgtaaagaccatctccaaataaagttgcatttgagggttaggacttcaacatatgaacttgcagaggtagggggacacacgccatgacagtccgtacaacattttagaaatgcagcccaatgttatttatcttttctttagagaattataattaataggaccttcagtcggcaacgtgttctcagtgggttccagcttgtgtgggtgttgcgtgcagtgtgtcagcatgcatatgtttgataaagttttgatgtgaagaaggggaggccttagacctgcagttttcatgaattcactttgttctatctgcaacgtaggtatcagaatccccggaagacctcgggtgtgcgttgagaccccagagctcagggacagtgtacgaagctgccgctgtggaagtggatgtatctgcttccatcacactgcaagtgctggtcgacgccccagggaacatttcctgtctctgggtctttaagcacagctccctgaattgccagccacattttgatttacaaaacaggtaagtggaggaataccttcttgacataaaatgtggttcatttggaattttgtttcaagtttctgttcatgtttattgtaaaccttttttttttgtgagtcagggtctctctctgtcacccaggctggagtagagtggcacaatcttgtctcactgtagcctcgaccttccaagctcaagtaatccccccaccccagtcctcccaagtagctgggactacaggcgcgtgccaccacacccagctaattttttaaattttttctaggcaccatggtttttcaccatgttgccaaggctggtcttgagctcctgggtttaagcgatccacccacctcagccttcaaaagtaccgggattacaggtgtgagtcactgcgcctggcctcggcctgttttttgtaactcttatcttcagtgaaataatgaactaaaaatacagttagggcatcaatacatgacattatatatctgtcaaatctcataggatgtataacacaaaaaatgaaccctaatgcgaactatctcgctctgtcatccaggctggagtgcagtggcctggtcttggctcactgaaacttctgtttcccaggttaaagtaattctcctgtcttagcctcctgaatatcggggatcacaggcgcacaccaccacacccagctaatttttgtatttttagtagagatggggtttcaccatgttggccaggctggcttcgaactcctgacctcagatgatcctcccacctcggcctcccaaagtactggaattacaggcatgagccaccgtgcccggcccaaactatgaactttaaaattggttcatcaattgtaacaaacatatcacacctatacaagatgttaataataagggaaactgtgtgtggagggaagggcatatatggcatctttctgtgtcttctgctcaattttcctgtaagtctaaaactctctaaaaagtaaagttggttgggtgcagtggctcatgcctgtaatcccagcactttgggaggccgaggtgggaggatcacctgaggtcaggagttcgagaccagcctggacaacatggtgaaaccccatctctactaaaaataaaaaaattagcctggcatagtggtgcgggcctgtaatcacagctacttgggaggctgaggcaggagaatagcttgaagcccagagggggatgttcggtgagccgatgtcacgccactgcactccaacctgagaggcaagagtgagactccgtctcaaaaaaaagaaaaaaagaaacaagtctattaagttaaacctatacacacagacacatatataagtatatagaaagcagtgagtggctggcaaaatgtaaaacaaatagtgaaaagaatatctaggattttttttcctttttcttttttttttttttaaatatttttaccttatttacaattaagaatttttttttttttttgaggcagagttttgctctgtctcccaggatggagtgcagtggcacgatctcacctcactgcaacctctgcctcccagctgcaagcaattctcgtgcctcagcctcctgagtagctgggattacaagcacccaccaccattcctggctaatgttttttgttttcatttttttttttttttttgtatttttagtagagacagggtttcatcatgttggccagtctgatctcaaactcctgacctcaggtgatccactcacctcagcctcccaaagtgctgggattacaggcgtgagccaccgcactgggtctatttgggattttttaagtgtcttgttttttagttggatatcatgttaaagataaaatttagaaagttttcatttcattcttgttagtgtagcaagaaatttcttttttaaatttatttatttatttatttatttatttatttatttatttattgaggcagagtcttgctctattgccaggctggagtgcagtggcatgatcttggctcactgcaacctcctcctcctgggttcaagcaattctcctgcctcagcctcccgagtagctgggattacaggcacctgccaccacgcccagctaatgtttgtatttttaatagcggtggggtttcaccatgttggacaagatggtctccgtcttttgacctcttgatctgcccacctcggcctcccaaagtgctgggattacaggcatgagccacagcatccagccaagaaattctttaaaaaaaaatttttttaaaggaaatttattcttgggaaatgcttgggaaaagaacatttgatcttatctattttgtttcacaatatgataagcagaattgcaatgttatgtgctatctacagattatttagtaagacattgatctgtctgtgaggaacatcgatctcatccagaaaaatgtcttagccaagatgtgtgggtaatgtcctaaccctgtatagctctatgctgattgctgccccctgctgtccttgtcctcttgccgaaatgagatggggcaaaggacataggtcaattaaatgccctcttaacgcagcctttcttttacattcttgtggctgtcctgttgtcccttaggtgtagagaaggcacgcgctttccaggaactatgtagtaaacagtacccaaatggcctgcaaggggtatcgggccccttgatagggtcttggagaacgtctctgtgatcaacttgtaccagttatttgtatttgtttttaaggtcaaatacattcttctcttaagtgatttgcaggacagtgagtatagttctgaagttgagttctaaatcttggaacgcattcattttcctttcctcttttgcgattgtattactcacttcttgttttttggctgcaaatgtgctgggattacaggcgtgagccacagtgccagccacattttttctttttattgggaaggcatctcaatatgttgcccaggttagtcttgaactcatggcctcaagtgatcctcctacctcgcctcccaaacttctgcgactgcagacgtggtggctcatgccaggcgaatggttcagagaaaaaaagcatatcatcaaaatagatctgcagaagcaaatcaagtatatatcctgctaattgactgtgtttaagaatgcaggcccatgttctattgaacctgcttgctgctttaaagcagggcttctcgaatataacctgtatttggattgcctggggatcttgtttaaaatgcagattctgatgagtaggtctcagtgggacctgagattctacatctttgtcaactcccagctgatgctaacactgttagagaaagactacactttgcacagttaagggtctaaaggtcagaaagtgtgaacttattttattattttattttattttattttttgagatggagtttcaatcttgttgcccaggctggagtgcaatggcatgatcttggctcaccgcaacctccgcctcccgggttcaagcaattctcctgcctcagcctcctgagtagctgggattacaggcatgcgccaccccacccagctaattttgtatttttagtagacagggtttctccatgttggtcaggctggtcttgaattcccgacctcaggtgatccacccacttcagcctcccaaagtgctgggattacaggcatgagccactgtacctggccgtttttttttttgttttttttttttaatttttaaaaaatagaggtagggtctcactatgtggcccaggctggtcttgacctcctgggctcaagtgatctgccagccttggcctcccaaagttctgggattacatgtgtgagccactgcacccagcttactgtgcttttgttgttgttttttcagtttttttttgagacggagtttcactcttgtcacccaggctggagtgcagtggtgcgacctgagcttgctgcagcctttacctcctgggttcaagcaattctcctgcctcagtgtcctgagtagctgggattacaggcgcctgcgccattctcagctaatttttgtatttttaatagagacagggtttcaccatgttggccaggctggtctcgaactcctgacctcaggtgatctgcctgcctcggcttcccaaagttctgagattacaggtatgagccaccgcacccggcctcctgtgtgtttttagatgggagttttcgatcctagaagctcagagaaggtgagatgatggcaccggaatggagctctcccaccctcaaggggaggactggttaaaagtcagggttcaacgagcaacgcccaggctgagtgctgggcacatgacagaagctgtgttctccacagagcggcttccgtgccagtcggggaacgctggagtaccaaactgcctttttagtcactatgaaattttgtttttagtttcacacattttccaaaataactagttctctttcctgttttgcagaggagttgtttccatggtcattttgaaaatgacagaaacccaagctggagaatacctactttttattcagagtgaagctaccaattacacaatattgtttacagtgagtataagaagtaagtccagcctgctactagtattccagcctggaataccacaatatttcaaaggagtggtttagaacccgttagcttgaccagctcctctagacatattcaggtttcccttgatacgtagttggattgattagattcctgtcaaccctctgtagaacctatagagaactgagaatcactgatgaatcactgatgtgtgccgtgggctctcagaatgtgactgctgctaaaaacgcctgggacgtcctctgttcagtagcagatggctgacagggaagaaatggaaaacattttgaccttggaatcagaagacctctgttctaattctggttctgatactaccacctatggcaggtcacaatttctctgagccccgatttccttattggtaaaatgaggataaaaatacgtacctcacaggattggaaggtctcagcgtgatccaatagaactttctgagatgatgaaaatgatcttgtctgttctttccaatacagtagccactggccacatggggctgttgaacacttgaaaggtggctaaggtgactgaggaactaaagttttaattttatttaattttaatttgttaaaattggaatgtaaatagccccatgcagctaggggctactgtgttggacagcgcgggcccacatgcgtgctagaccatatgcaaactgtaaggaacggtccagatgttctgaccaagggaggcagctgtgcagttggcagaggcaccacctgcgtgtgctttctggcttctccttgtttcgtccccatcatgcacagactccgtgctatgcacactgaacttgctgcttcgccttccatgaccaagaaggactaaaggtgtctgcattcacttaggtcctcgtgcctttaggggccagtgcagtgctccaaaaaccctgggttaatatcacttgaaattaggtccccccgacacattgacacaacttgccaggctcccctcttccttgtcagtgactaaatgtccggcccacagaggtgccctgggtcaggagtaaccacaactgccctttgctgaagatcttctgcctgtttcatctcagatgctcacagcgatcctgcatgcatgtagatgagaaaacagcccctctgagaggtgtggtggtgggcacagctggaggctttctgcaccacactgccctgggtcttgtgtgagaatgtgtgggtcttgctgtcaaagctactaacagaagagagcacgcaagagtcccagaagcatcatcttactggggttgggggtggagtaaggttctaaagtcagcctgtaaggtatacatgagctaaagtcaaaattacccaaaatttattctggaaagtcctttaattactctgaaaatgataggaccagagccctacaagctccaaagccgagaatcaccttatgttgctctttaatgtcggtcatgttccctgccccctttctagtccctcaccgcctctgtgggacagtaaatacgtgccccaggttggatgaagctaggacgtttcttgttctctacttctcttcctctttctccttttttctctccttttaaaattttcttgccaagtataaacagttgtataaggtaagtgggcatctgctgtgtctctgttatacttagggtatattcctttcacttaagatttacaatgtaaaaatgtaacaacagttattcaggtaaattataacttatttttagcattctgcaaggtggtgggatccaaaaaataggtgggagagatgtggcaacagtcagtgtgaaaaagaggaaagggtttagtcaaccacaagctcagtattaaccaccagcgtggcatggttgccaaaaaagtaaatttgaaccttggcagtgttcatgaaaatataacgtctaaattaaggaaattaatagaagcttattcatttcagttctacttttttaaagatgaatactgacaaaatgagcaaccaggatagtggaaaacttggaattctttaaattaggagcagttgaaggaattgggaatgtgtagtatatagaaggaaatgttttgaggagacgataagattgattgcagtgtaatgcagaggaaattcttttgggatttgagtcaggaaacctgagctaactagttaaagtaccttgtatggtaattatctcccttgatctcggtttctgattttaaatatttgaaagattttcatatggaatcaaagctagactttaaaaaagttgctctagaggatatgataagaaccaattgttagaaattacagggagaaaaagtaaaaatcacctcaagatgggaaaaaatacttgcagttcacaatcaacaaaggattaatagtcataatatgtaaagtcaataagataaacaatctatataagtcaataagtcaataagaaaaacgaacaaaatgaaaacctagtagagcaatgaacaaaggacatgagtaggcatttcatttttggaacatgaaacctaaatggtcaagaaacatgttaaaagataaacttaggcactttaaagttgtaaagagtatatttgagcagaaagcaattcatgaatcaggcagtaccagatggcaagcaggtgggctccagtgaggagattcaagggtaagacttctttctataatgtgttcccggaagcaagacaaagaaaaaatttgattgtttaaagaaggacagtccctggattggtcagtttgcagttcctcattgattaagctaagttgcattttgctgctcatattgaattgggtttgttttttgctttttgttgttgttgtttttgtagagacggggttttggcatgttacctaggctggtctcgaactcctgggctcaagcgatcctcccgcctcaccctccctaagtgctgggattacaggcgtgagccaccttgcccggcctttattcttttcctttttttttttttgagttgtgttgtgatttgtttacctaggaactcaagctgttagagttgtctcagcctaatggactcccaattaattattttaacacatgttaaattaataatggagaaattaaattaagaccacaatgaaataccattttatacttgctggattgctgaaaattaagaagtcttggtaagtctataaagcaataggtgctctcatatcctgctgtgtaacataaattagtataaccactttggaaaacaaatgatcattatgtgtaaggctgaatgtgctcataccatgtagaccagcagttccactcttaagaatgttattaaggaaactgttatacacatgcctcagtacaaatgtgtagaatgttcagagcacatggttgatcatacaaaaaactgtggccgggtgtggtggctcatacctgtaatccaagcactttgggaggccaaggcaggaagatcacttgagcctgggaggttgaggctgtagtgagctgagattgcaccactgcactccagcctgggtgacagagaccctgtctcacacacacacacggaaggaaacaacccaaatgtctactgcaagaaaatgaaaaaataatgatatatttaccaatagaatattatgtagcagtaaaaaaaaaaatgaataaagtatagctacatgtaaaaccatggatgaattttaaaaacataaggttggatgaaaaaatgaagttgtagaagttacatattgattgataacactattttgaagctcaagaatgaaaaaatcaatatattgtttagtgccacatatttatttggtataactactttgaagagtcctcgaataatcaacaaaattcaggataaaggatacgtgcagttgagaggtggggagaagcataaaagtagatcaaaaggtatttattaatattctagttattaggtggatagtggctccgtgggtatttgttgttgttatgctttgaaatttacactccatatattctttcatatatatatatatatatcaaacagtacatagtattttcaaacaaaatttattgtaaggagagaggctggaattcagtatagggaaactttctttaaaaaaaaaaaagtttgtcagaaattagaatgacctgccctgggaggtcatgaactccagtctctagaagagtcaaagtagaagtagaaagtttatgttagaaatagctgggagtgaaggatggtgtgtgtgtgtgtgtgtgtgtgatccagggtgagtgggaggctcaactaaacctcttaagttctgttgcaattccaactccaccctaccatgtttcttctgtctttctaaatcttagtatatttctgcctagttgcagatcaaattataggaagaaagttgaggtctaaactatgtgttaaacaagggtttaagccatatgttattgctaatttcctttttcctgtgcctatcaatatttgtattttcacatggcttcactcgactactttagttagctgtggatttgtgaaatacccaaagaaattggccaagaggagaaatgttcaagttgacactgcagccacagctaaatttaatataatggttggtttgcttttgatgcctttattatgaaaaaagaaaaaaatatgtatacgtaatggttgagaacttttcataatgacatagaatccttttctgaggggctgctaagagaattatttttaaaatagtaaaatgttaataacttatgatgctttagataccctgctttacacattaagaagaccttactttagaaaaatggaaaaccaggacgccctggtctgcatatctgagagcgttccagagccgatcgtggaatgggtgctttgcgattcacagggggaaaggtatgacacatccatggtagctgctattctcataatttccttttggcctttttctaatgtagttgacatcaagctgtatgtaaaatttaatttatgctcatttaaacaggaaactttggcttcttaaagttaaaaaatggccagtatagggccgggtgaagtggctcacgcctgtaatcccagcatttcgggaggccaaggtggacagatcacttgaggtcaggagtttgagaccagcctggccaacatggtgaaaccccatctctactaaaaatacaaaaaattaactgggtgtggtggcaggcacctaaaataccagctactctggaggctgaggcaggagaatctcttgaacctgggaggcaaaggttgtggtgagccaagatcacgccattgcactccagcctgggcaacaagagcgaaactccgtctcaaaaaataaataaataaaattaaaaaaataaaataaataagtaatacagaatggccaatgtgggcttcacagggaggacaaggatttttttggtaaggggctttttggaacccctcaaatcaactgcagggcccttcctgggcatcatgctacacaagtaaaagtccctctacgttccaggattgttggctccctgggcatctggttggggcaaaaagaaagatactgattttaaagtagaattatcttataagtaagaaattctaggctgggcacagtggctcacgtctgtaatcccagcactttgggaggccaagaccggcggatcacgaggtcaggagatcgagatcatcctggctaacatggtgaaaccccatctctactaaaaatacaaaaaaaattagccgggcgtggtggcgggcacctgtagtcccagctactcaggaggctgaggcaggagaatggcgtgaacctgggaggcagagcttgcagtaagccgagatcgcgccactgcactccagcctgggtgacagagcgagactccatctcaaaaaaaaaaaaaaagggaaattataggctgggcacagtggctcacacctgtaatcccagcaatttgggaggccgaggcaggcagatcacctgaggttgggggttcgagaccagcctgaccaacatggtcaaaccccgtctctactaaaaatacaaaaattagccaggtgtggtggtgggcatctgtaatcccagctactcaggaggctgaggaaggagaattgcttgaacccgggaggcggagattgcagtgacccgagatcgcgccattgcactccagcctgggtgacagagtgagactccatctaaaaaaaaagaaaagaaaggaagaaagaaattccttgtgacaaaatgtttaatttctgattatcctgtttgttctgggaaagcagtctaatatgattgtttaaagatatagaatccagagccagatagcctgggtttgaaccctggtttgcttagcagctgtgtggccttggacaagttacttactctctgtgcctcatcagaagaatgcggatgacaacagatacttataggattgctattctgattaaatgaattgatatatgtaaagcacatagaacagtgcctagccaatactaagtaaggtataaatgtttacatagtttttcatatatgccaaagttaagttcttacaaagtaaaaattcatgcagtttgaactaattaaaatttactaaacaacttttttttttttaaaataggaccaaatagaaggagaaaaagtaccaaatactttgttccaaagtggtacaaaagttcgctttctgctgaggcagggagaggggttttgctctgttgaatacttgggagtcttggctgacttcccttgtgggtgacaccttggccctcctctgttcctatgggaactcgggtgacttttgaaactttagcttccccctcccttactgcgtcccaaaaggatgcttaccttgctaaacttcatgaaagcccaatcatgctttttctcttctctctttcttctctttttttcctttatcttctttctcatttttttccctttctttccctgtctttaaacaacagcaacaaagagatcaccaaacatgaacaattttaaactgttttgttatgtaattctccttagtgttatgctaattcattgcgataatgagtaactagctagctcccctctgagctcttagctgaaaccatagatatgggcttgtttaccttttgaccttttgtttaccatttgacccttaaaactggctctagaactttgttctcctcttgagcattcatttgtaattttaaaacttgtttagccaaatggtacttcttttctaattgcagctgtaaagaagaaagtccagctgttgttaaaaaggaggaaaaagtgcttcatgaattatttgggacggacataaggtgctgtgccagaaatgaactgggcagggaatgcaccaggctgttcacaataggtaacactataatatcatgcactttcattttcagtgaccggttcttagcaactatcagggactaacagtaactgcgtaggtgatcattcaacttcagaaatcctatcattccttcaggtcacagtaaatgcaatattatggattctgtaaatgctgatttcttcataaaagaggagtcagtctctaaaagcttcttttattaatgtggttagtaatatttgagatgatgctaaagtctttgttcagaatgttcaggatatcttttgtgatgaggcaaaaatcactttttttttctcacttgggatgttttcatctcctagatctaaatcaaactcctcagaccacattgccacaattatttcttaaagtaggggaacccttatggataaggtgcaaagctgttcatgtgaaccatggattcgggctcacctgggaattagaaaacaaagcactcgaggaggtaataggacaagtttgtattctgaaaatgcaggaacaattaactaatagtctggattgaaaacattaaatgcaaactctgttttattaaaacctagggcaactactttgagatgagtacctattcaacaaacagaactatgatacggattctgtttgcttttgtatcatcagtggcaagaaacgacaccggatactacacttgttcctcttcaaagcatcccagtcaatcagctttggttaccatcgtaggtaatgcaggctgctcacacaatctttattcctatttttagtcgctgtagtgtggaatgtgaagtatgtggtacaaattctgatttcaatataatgctactatcaaacactaagaaagaaactgagttagaatagctttgcaaagataatctgcccaccctcttccttttcccgttaaaccaggctcgcttgaatgccactgtctttgcatataacacattgtaatatgaccatctgtttgtgtacttttatcctccagtagactgtaagtttcttaaggacaagaacaactcattctatccttgtagttccagaacctgacacagagcctgacacaaaatggacaataaatactagttctaagaaccaactaaccgcactgttagggcagtgagcactgagagacagtacaagcccttagatgcactgaaattttggtggggtatgtaggatctgaaaataaccacagttcaataatctcagattagggcacagcgttcagccataatgaaaatgccgagaaatacagcgatgctcttagcagattaataaggaagtgttccataaggcaacctcgtgaatattgctagccagatcgctcttttatttgtgccttgagtttattttactctctctcatcaatggaagagtggtgctggctgagagcaggggccagacagtcaattatctacatcccattctttttctttccttctttctttttttaaacatttcttaacttcgaaagatgatgagctcaggcttagaactagggataggactcctgggttttcacttggattatccaacctgacctgcagcatgccaacacttgagttttcctgtgttaaactgatgaatacaagtttattttatcttctcaatacgtttccctatgaatattattaactaactcataaatgcctattttttcttacagaaaagggatttataaatgctaccaattcaagtgaagattatgaaattgaccaatatgaagagttttgtttttctgtcaggtttaaagcctacccacaaatcagatgtacgtggaccttctctcgaaaatcatttccttgtgagcaaaagggtcttgataacggatacaggtgagaccacaaaggactctaagataccatttttagcataattctccttgcttgtcgcccttgagaaggacagttttatacttatggaagcaaattcacttatgagtttaactattattgagttgaaattggagataagaaaacaataagcagatgtgaggatacagtagcagtcttaccattactttagataatataacctgctgcatgaaaacagaaagaaccgtattagtctggtctagtttgagtctggttctctggcattttctgagtcacaaggtagtttttacttcctgtttgagagtgcggtgtgtaggacactgagtctcccctaaaacatttgcagatgattgaggaagtaaaactccttaaaaacagaaaaacattactcataggtgtattgatttaaattttcaaaaaatacatgcagaaatagcccaatagtaagtgctgaaggaaaatgttgttttcctcgggatttgtatgagaaactatgcaagattcttttttttaagaacaacaaattttcttttctttttctttttctttttttttttttttttgagatgaggtctcactctgtcacctaggctatagtgcagtggtgcaatattggctcactgcaacctccacctcccaggctcaagtgatcctcccacctcagcctcccaagtagctggtaccacaggtgcacaccaccacacctgactaattttttgtatttttggtagagacagggttttgccatgttgcgcaggctggtctcggactcttgagctcaggagattcaccctacctgggcctcccaaagtgctgggattacaggcgtgagccactgcacccagccgaaagattctcttgtgggaggaattctccattccttctttggaaaacaaaaaacaactttcccctatatcttctatagttatgacatctcttgtctctttaaactaatgctatggaacatggttttggactaggctatgagacactgagacgcacatgttatctttcaaacaagtcaatggactagaataaatcatcctttctcagcatgtggtctgttgaacaactgtgtaagaatcatctgagcaaatgtttaaaatgtggattcctggctcccattccagacatgctgactcaaaactggggcaaaacgctcagactctgcttttttaatgagaacctttggtgattcctatcacaggtctagatctgtgctgtccggtacggtagccaccagccacatgtggctattgagagcttgaagtgtgtctggtccaaattgagatgtactctaattgtaaaatacacactagattttgaagacttagtatgaaaaaaagaatgtaaaatatattattaataatttttatattggccgggctcggtgggtcacacctgtcatcccagcactttatgaagccaaggcgggtggatcgcttgatcctaggagtttgagaccagcctggataacatggcaaaatcccatctctacagaaaatacaaaaatgagttgagtgtggtggtgtacacctttagtcccagctacttgggaggctgaggttggaggattgattgagcccaggtggtcgaggctgcagtagccatgatcacgtcaccgcactccagcctggatgcagagcaagaacctgcctcaaaaagaaaaaataataataaaattaaaacaatttttacattgattatatattaaaatgatagtattttggatatatcgcattcagcgaaatatgttattaaacttaatttcacctgcttccttttactttatacagccaacagaatttgtaaatgatgtacaaggcttgaagttgtgactcacattctgtttcattggctagccctgttctagatgaagagtaggagttcttttcaccttgattccgctaagtgtttgtttcatgattattgttactctttatacctaaaagggatttgtactaaaagtcccttgttgggacttttagaatctcagtgcagggtttgcatggagttgtctactgtctcttactgaaaccccccaatgttcagagcattcatttttaaagtaattaagaatgcagactggtctgggagctgactgaaacacactcccccaaactcagggtttgtcaacagtggcgctgctggcatgttgagctggataattctttgttgtgaaggactgtcctgtgcactgtaggatacttttcagcatcccgggtctcctcccactggatgccaggagcacattcccttttcccagtgtgaccaaaaatatctccagacactgccaaattgagaaaaataacccctggcattttttttttttttttttttgagaaccattgccttagaggcatcaacccacagtcatcgtaagctgttattcagaaatatcaagctttttttttttttttgagacagagtcttattctgttgcccagactgaagtgcagtggcacgatcttggctcactgcaagctcctgggttcaagcaattctcctgcctcagcctcctaagtagctgggattataggtgcatgccaccatgcccagctaattttttgtatttttaatagagacggggtttcttcatgttggccaggctgttctcgaactcctgacctcaagtgatccaaccgcctcagcctcccaaagtgctgggattacaggcgtgagccaccgcgcctggcccatcaagcttttaaatgtagaaggttggagagtcagcccctctttaccctagttgacttgattaccacttggcctgtgttcagaaggaaatcagcatatcactgtcccctctctcctttgtatcctatccccatgttagataagctcttagcattatgggaatctcttctgaacctgattcaaagagagaaggggtcgattcaatttagttcaacaaatattactttaatatcctcttgatgggtgtgatgctgtgatgggctgcaagagtgaataaggtaatgttgctttccctctcccgcaagaatgtacacagattgctactgtgctggtgatatctggtataaccttttgagattttacagaatcgccagttggggaccatgtcactgacatatgggtcatgggccaatgtagtgggctgcttcatgtagtttcattccatggctacaatccatacccatgaccccagattgttatcctatagaggtagccaaatgaatgaattaggtgagctcctgactcctatagcgttttgtacctcactcattcctacttatctggcaacagataagtatgtatgtcacatctcaccagggagtttataaactctaagaataggtatgctgccatatttctctatctttgtacaatgccttgttcagtaagtgtgtttaataaatgaatgaattcatcatcatatctggaatgcaactcacagtgcagtctgggccaaagatgagtcgacagcatcctcttcactgcaaggaccatgcacatggttcttagcacaacacccagtactcagtgtttattgttatttgaaagttcttgaagagctacagtgtttgtgctaatgatgtgcattgttggtactgataatgtaccaggtgttatgggccactgacgacacacagcaaaggaaagatgggccctccttcttcatgagaaaacatgctcaaagtactgaacaagaaacgaacaacacaaaatttgaacacgcctctgagtgctctaaatgtctttttctctccacatgaggctctatgttgagatggggatggaggactagattatagtcaggggtaatttccacttttctttgtttttgcctttttttttttttttgagacagagtctcactctgtcgcccaggctggagtgcagtggcatgatcttggctcactgcaacctccgtctcctgggttcaagtgattctcctgcctcagcctccctagtagctgagattacaggcatgtgccaccctgcccagctatttttttgtatttttagtagagacggggttttgccatgttggccaggctggtctcgaactcctgacctcaaatgatacgcccacctcggcctgccaaagtgctgggattacaggtatgaaccaccgcgcctggcccttctttttgcttttttttttgagacggagtctcgctctgtcacccaggctagagtgcagtggcgcaatcttggcttactgcaacctcctcctcctggcggaggtgattaagtgattctcctctcggtggaggtgagtaagtgattctcctgcctcagcctctcgagtagctgggattacaggcatgcaccaccacactcggctaatttttgtatttttagtagagacggggtttcaccatgttggccaggctggtctcaaactcctgacctcgtgatctgcccgccttgccctcccaaagtgctgggattacagccgtgaaccacctttcctggcttctttttgctttttagagtcagggtcttgctatattgcccaggttggattctaactcctgggctcaagtgatcctcccgcctcagcctcctgagtagctgcaacttggcgtgtgccactgcacccgtctttccttttgactttttattatagaaagtttcaaatttactaataagttgaaataatagtgcatgagcattctttacctaccacctagattcaacaatttaattgaaccgaatttggtttgtgaagtacagtattttagtcatgtatcaagattttataggcaaagtgatacaattttttaaaaatctgttactgaaaggcccctgtaataacactacccctgaaaaaactttggtgtggtcatggtatgtgcaccagaaatctctcggcttccccactttcatggcttcatttctccaatttacttcctcaaatattacgccaaagtttactagggcttgcctttatgttttattaaattataactttctagccgtcctggtgtcctggtcctgataaaggtttccaggatatttcacccattagtttgtataatttcctatctctacagacttaattacaaattccaaatctaccttagctttttccacttttatgggaaaaaaaaaaaggaataggactgttgtaattacttagtaacctcttctgaaaccttctccttagccttgcctaagcctgatgttttcctttttcctgaaatatttaattttccaactctgtgaatctaagttttgcccacagtaggcactaaccgagtgcttacggggtaaacagctgtgtggtggtcgtttgggttctgggtggtgagccagggtcctgctcagaagaaccacaaactgaaaagcaggctgtcacatacaatgagtgacacacaattgcagaagattatggagcctgggagaggagttgttttttttttttttcctattttctgaaggagttgagccttgagcacagacagaaaggagggaaaatgagggaaaagtttgagtctagagaaataccagcagctcctacctaaatgccgttcccattcacttctgcagtttgagacaacattcctggctgcaggtcttcccaagaccccactcagttgtaagttattaaccacatcttaagaagccattctgtgagaataaaagatccttctttgagctcttaccatgtgcaaaatcctataggtgtattacctcatttaactctcataatcccattttatgaaatgtggaaattgaggctaaattacttgcccaatcacagaaggcaaagccaacaccctttattccttctttttctgaaattgccttaaaaaaacacataattccacctccagagataacattgcagactttttctatgtaagcaccatgatagaaacatacaatatggatctttgtataaacatgaaataaggtaccatttgtaatctgatttttcacttaaaatatatcatgagtatctttctatattaataagtatgttgttatatctaccttattgctgtaatggctgcatagtattccacttttcagaaatttttattttaactaactcctgttgatgggcatcaactttacttttttttctttctctttctttgacatttttatttattattattattattattattattattattattattattatttcggatggaggcttgccctctcacccatgctggagtgcaatggtgcgatctcggctcactgcatcctccacctcaagcgattctcctgcctcagcctcccgaatagctgggattacaggcgtgtgccaccgtgcccagctaattttttgtatctttagtagagatggagtttcaccatgttggccaggctgatctcgaactccttacctcaagtgatcctcctcctttggcctcccaaagtgttgggattgcaggcgtgagccatcgttcccagccaagaaaccccttttcttagttttaatgagaacgcatcttcttagacaccgaggtattgttttactgtaaactcaaatgtcctgacctccgtctcctgccggctggccatttgtagaaaacccctaggcgaaagaggaagctttgcatctcccaatcagcctaattagttagtccccttggaattcccatggggtcaggacacggttgtcattgcagttgtcattgtttccagggttaactgtcataagcatgaggaaaggcagtttaaagccattggatattcagttttgtgttcctgctatttatgtgaccaatttcatacttggagtttgttcagaagagtgaaaaatgtttcaagtgctatctcttctaaaccatggcaaaccacactctattaagacagcacaaaagactgaggaagaaaaatgtttacgaaacattttgctttggtctgcctcatgataagtaattgtactggtcatttctttttccactgaattgactggtgtctctgacatgctctctggtgagccacactggcttcattacctcctctcttctcctttttcagggtctttggccattgtccagagagaattacactttctctcttagaagctcacgtctttcttctcttgggccacttccacgccagcctcttccacactgccttcctgaggtcgggcactggcatggagctctgtttcctcttctcctccctagggttgtaatctggctttcccccaatctttctattgtttccacttcaccagtgatttcctccttgttgtccagaaataggtcaggataagaaattcccctttttgacttcttcagccttcttgttaacaaagcaaaagaaggttaaacaccttattcaatgctcagcatttttttttttttttttgagtccgggtcttgctctgctgcctaggctggagtatagtggctccagcaattcccctacctcggcctcccaagtagctgggaccacaggtgtgtgccatcgcacccagctaattaaaaaaaaaaattctgtagagacaaggtcttgccatgttgcccaggccgatctcaaactcctgggctcaagtattgcaccctcctcggcctctcagagtgctgggattacagatgtgaacccctgcacgcacccaaaggtcaacttttaactgcctgaaacttttgataggtcagagagatgaattctcttgttcacaatacacagtcagaattaccttggcttacgagttcagggcacagaacattggtgtcacacaaacgtgggctcaaaagctgcaattacgcagtggcgttttgtggattttttttgtagagatgggatctcagtagattgccaaggctggtctcaaacttctggcctcaagcagtccacccatctcagcctcccaaagtgttgggattacaggtgtgttttgagtcttggggaccaactgggattctcttctcccctttatcttctgtatccaatctagcccctgccatttctttttttctggtgcctctagggtttgctcttttctctcctttcccattctcctccattaaacaacgctccccttgtcatgctccgaaacctcaaatctgaacttttacttctcctatcacagaaacttcccacactccaactgcttattacccctctaccttcaccaccaaattgtaaattctgtgagaacagaaacccaattttttgaatttgctgttgtgtcctcaatttccgtcacaaacaggttctaacattgacagttgaatgaaggaatgaatgaacgagttcttggattgctacaactgcctttaaacttccagtaaacttttgctgccatcagcaggtgcatataaaacactcttcataggccaagccaccctgactcatacctgttatcccagcactttgggaggccgaggtggggaggatggcttgagggcaggagtttgagaccagcctgggcaacatagtgagaccccatctgtacagaaaaattacataaaataaaattaaggctaggtgcagtggctcatgcctgtaatcccagcacttttggaggccaaggagagaggatcacatgaggtcaggaattcaagacgagtctggccaacatggtgaaccctgtctctatgaaaaatataaaaattagctggctgtggtggcgtgtgcctgtaatcccagctacttgggaggctgaggcaggagaattgcttgaacccaggaggcagaggttgcagtgagccaagatcacgccactgaactccagcctgggcgacagagtgagactccatctcaaaaaaaaaaaaaaaaaagttttattgcaatgctcagggcagtaagcattgttgtagaaaataagtaatttgtatttttaaaatgcgtaattcatcccggcactttgggaggctgaggtgggtggatcactaggtcaagagatcaagatcatcctggccaacatggtgaaaccccatctctactaaaaatacaaaaaattagccgggcgtggtggcgggcacctgtaatctcagctactcaggaggctgaggcaggagaatcgcttgaacctgggaggcagaggttgcaataagccgagatagtgccactgcactccaacctgggtgacagagtgagactccatatcaataaataaataaagtaagtaaatacaatactgttcatgatattctgctcccatgagaggcttgccgttcctcctcactgcagccctatgacttcccgtctggcgccttcagtcgctgctttgtctcctccttggatgccttttcttttgtcctctcatcaaaaccaactcatccgtgaggctccagctcgagctctacctcctctatgaaggccccgaacctttcccaccgacacagacctctgccttctttgatcatctgctggacttcagtttaatgctttaatgattccacttgtatgggtcctgtctatccacccggtttaggtatctttgaagataggagctacctactttttaggtcttttgcatcctccacactcctcatctaaagctgcgtccactctgactcaccttcctaacctgccaggcagggtctttttgttttttaaactttaagtaggctaggctgggcgcagtggctcatgcatgtaatcccagcgctttgggagtctgaggcaggcagatcacaaggtcaggagatcgagaccatcctggctaacacggtgaacccctgtctctactaaaaaatataaaaaattagccgggcgtggtggcaggagcctgtagtcccagctactccggaggctgaggcaggagagtggtgggaacccgggaggcagagcttgcagtgagccgagatagcgccactgcactccagcctgggagacagagcgagactctgtctcaagaaaaaaaaaaaaaaactttcagtaggctatgtggaggtcgagttagatatcttcggtacaagccttagatttctttttctgttttaagggaatttttttctttttctccaattttgttactgtgagtgcacgaaggcatattcaacaactcattgctgccctgcctctcctgcaccatccaacatctcactgcagtatccagcaacccacaggcctgctgggcgtggtggacagtccccaagatcaggttatctgtgtcaaaatattgagtggttgatgagtgctccaagtaggcactagagcctgctgagagcactcagaggtttctgcacaagctcagtggatttgagccctcatcgttgttcattgctatgtaagtcaagggttggtcataggtcctgccttggactgtcatttcaggaagcagggcagctacagcagcagtccccaacgtttttggcaccaaggatccattttgtggaagacaatttttccatagattgggggtagggggatggtttcgggatgaaactgttctatctcagatcatcggggattagattctcttaaggaacgcacaacctagatccctggcgtgtgcaattcacagtggggtttccgctcctgtgggaatctaatccctctgctgatctgacaggaagcggtaaagctctcttgcctgctgctcacttcctgctgtgtggcccctttcctaataggccatggacagttaccagtctagaggctggggggctggggacctctgaactacaggcttctccacctgcacaagttctgagaagttagactatccagagcaagaggggcaggaacttcctggtctcactgagaatcttcggccaatcccaactcccaatgggcatatgactcacatggtgatcatcttaaaatgcagattctgagtcagtgatttggaagggacctgaaatcttgcaattgtaacaagctcccagatgataccaatggcgatgttgatgctgcctgtctgtggaccacactttgagtagcaagggtctacaatatggacatttccttttccagtgaactttagcaagtgaggagcatttcaaggaagacacctcccatgcacactgtcattagttgcagcatctcctgtagcaattgggctaaatctgtctttaattctttttcaaacagcatatccaagttttgcaatcataagcaccagccaggagaatatatattccatgcagaaaatgatgatgcccaatttaccaaaatgttcacgctgaatataagaagtaagttaaattgccgagaatttgatttttattttttaattccttaattttttattagtcttaactaggaaaagttaagtaatggcttagaagggctactacaaaactgtttttgtacgctgaagtgttttgaaactttactctcatatctactggcattgatcatatatctttttattttttatgttattttgttctgtttcatttttaagaccaggtctcactctaccacgcaggctggggtgccatggcacaatcatagatccctgtagcttcaaactcctgggctcaagtgatcctcctaagcctcccgagtagctgggactacaggcacgcgccaccatgctcagctaattttaaaaccatttttgtagagagggggcctccctttgttgcccaggttggtctcaaactcctggccttaagggatcctcataccttggcctcccaaagtgctaggattacaggcgagagccactgcacctggccatatatctctttctgtgtgtatcatcagaagctgaaagacttatttcacattgtctctgaatatgaattagtgttatgactttattgattttagtattttgaaaggtcatgttaaggaaaggctgaaagtcattttatctctcatttatttgtttttaataattttcatttctttggcttataaaacaatgagaagtccaacttctcctgaagctaagaatcattttaaggcatgcaaacaggtggaggtctgtacctcagctctctccagggagaggctggcaatggaaaaatggtgtgtagcagagaggttgcatggcaaggaggttgcatggcaaggaggaaagaagaaattaccagaggtctggaggcatcctaaatgagaaatcctcccagaagcacaaactgccctggagtaaatgggtagcctgtactgtaggcaactttgaaactatttccagaaagtaccatactccaagagcttattttattttattattttcagagacagggtcttgctgtgttgcccaggctggtcttgaactccttggcccaagtgatcctcccaccttggcttcacaaagtattggtattataggagtgaaccactatgcccagccagtgagcttatttcacacgttcttttctatagggaaacctcaagtgctcgcagaagcatcggcaagtcaggcgtcctgtttctcggatggatacccattaccatcttggacctggaagaagtgttcagacaagtctcccaagtaataaggacattgatgcctcttataatggaagaacataaaactctctgacctattgactctttcatgaatacagtttaagaggaaatgatgaaatatttaaaatgctaaccttctcaatcaaccataactctcaatagtcatagactgtttctgataacttatactggatgaatctcttttagaactcgctgcagaaatcctaacttccaatctgatgacagctcacctgtctaaattctttgctattttttttttcagctgcacagaagagatcacagaaggagtctggaatagaaaggctaacagaaaagtgtttggacagtgggtgtcgagcagtactctaaacatgagtgaagccataaaagggttcctggtcaagtgctgtgcatacaattcccttggcacatcttgtgagacgatccttttaaactctccaggtacaacagttgttcttgtgatattccaccatcaggaattccccactagaagttagtccccatcgctgacttttacttggggaattttacaggagagtatagggtcagtgtgtgagaaaaggtttcttgagtcaggcaagaatccccagagagactgtttcacaggttggggcggagtcctccctgtgcccttgtgactcatgtgtcacagtgaccgggagaagcagaaactcccagtgtggtgaatctccatggaaagatctaactctagagaaacagattttgtcacttggagtctctgtcattttcccttttgattagcctccttatttgccctcagcttgctgttttataatttttggtttgctttttagagccctcctaagttaaacagttgtgaaacctggctgcccaccctagtagttaggatcaccaacctcacaaaactgacttctccactttcatgtgcgaccttcataaaagggatatgaacttcttttttctctgacttgtacatcctgtaggtttaaatccatgcatttttttttttgagatggagactcgctctgtcacccaggctgcagtgcagtggcgtgatcttggctcacctctgccagggttcaagcgattctcctgcctcagcctcccgagcagctgggattacaggcacctgccaccacgcccagctaatttttgaatttttttagagacgggatttcactgtgttgcctgggctggtgtctaattcttggactcaagtgatcctcccatcttggcctcccaaagtgctgggactacaggcgtgagccatcgtgcctggaccagatgtaattcttgtaaatttaccctagtaaatggttttaaagaatggattgagaataatccgcaattttctagggaggaaatgtatcctttacagggacattgcctgattgtctgtggggagtagagtatatgtagagtggttgttaggactgaaaatgattattactgaaacaggatgtgagagattataatgagttgtccactatttataatgtcacacaggaattctgtttcatcgctgagtgacactcttttgttgcaggccccttccctttcatccaagacaacatctcattctatgcaacaattggtgtttgtctcctcttcattgtcgttttaaccctgctaatttgtcacaagtacaaaaaggtaaaagcaaaggtaaaaattcattattctttcctctatctgcagaactgcctattcctaactgactcatcatttcatctctgaagcaatttaggtatgaaagccagctacagatggtacaggtgaccggctcctcagataatgagtacttctacgttgatttcagagaatatgaatatgatctcaaatgggagtttccaagagaaaatttagagtttggtaagaatggaatgtgccaaatgtttctgcagcatttcttttccattggaaaatctttaaaatgcacgtactcaccatttgtctttgcagggaaggtactaggatcaggtgcttttggaaaagtgatgaacgcaacagcttatggaattagcaaaacaggagtctcaatccaggttgccgtcaaaatgctgaaaggtacagtatagtggaaggacagcaacaaagatgcacaaaaatgggaggcacagtttcccacccatgccttcttctcttttccatccttttaatggttactgtttgccatgtttcaaggctaaaaatggagtggattggggtgtcaacccagtcatgaatacaaaattcaagtcataaatacaaaactccacctcttcttccacttctctctttgtttatttttattttcttttatttttttgagacagggtctcactctgtcacctaggctggagtacagtagtgtgatcatggctcactgcagcctccaccccctgggctcaggctcctcagcagctggggctacaggcgtgcaccaccacgctcagctaagttttttatttttggtagagacggggtttcaccatgttgcctaggctgatctgggactcctgagctcaaactatctgcccgcctcggcctcccaaagtgttgggattacaggcgtgagccactgtgccaggcctatttagtttttataggctttgatatttggggatacagttgccacaggcagaagttctttcttacatttgtgttgttttatttttagagacaggatcttgctctgttacccaggctagagtgctgtgatcatagctcactgcagcctcgacctccttggctctagcaatgctctcacctcagcctcacaggagtgtgccaagacaattggctaatttttttttttttttgtagatacggtgtctcaccatattgcccaggatggttgcaaactcctggctcaagtgaggctgccttggcctcctaaagtgctgggattacaggtgtgggttgaaacagactctgggtaggagagaaaactggggccctttgtatcctcacttcgttgctccatccattccgatctggcgtccagccccattgctggcctcaccgttaccaccgctgacccagcaaaagcatctccagctggctctcttgctaaggtcaacagtgacttcaaaccaaaccaagcctaatggatatttttcagtcctcattacttgattgttcagcatgaattgatgctgttgattcttctctccatccagaagctttctttctttgggttttgtgtcaccatattctggttttcctcccacccctctgcccttctcagtcctttgtgggctcatcttcttccatccagcttttgttgttgtggctgattttgaaactcagtcctttgtgggctcatcttcttccatccagcttttgttgttgtggctgattttgaaacacagccttgctctgttgcccaggctggagtgcagtggtgtgatctcagctcactgcaacctccacttcccaggctcaagccatcctcccacttcaggcccctgagtaggggggactacaggcatgcgccaccatgcctggctaatttttgtatttttggtagagatggggcttcgccatgttgcccaggctccatccagctttttatggggcatccctgtgggcttgctcctggaccgccttgcgttttcgctccacacactcaacacagtccatccccactacacccgtgatgtcctcccatacaccaagggccctcatgcttgcgtctcctttcggagcttcaggttcatatgttaaatgtttggatgtctcaaaggtccctttaacacagtgtatgcaaggtgaattcccctaaccctggccctgcaccagcagtcctctctgtgactggtaatgaatgccagtgaataaataaccacattctatatagttgggcacactagaaacccgtgacttttccttgacaccttcctctttctaacaccctgtgagctaatcctatcaggtttccgattagtgtctcttgattccatcctcgtccctccatctctatgaccaccactctagttcaaggctctctcctggacaaaagcttccaaagcaggttcctgtatccactcttgcctccctttggcttctccatactgaggtccaagtgacagtggcgaaaggctaagcagatcaaatggctttcctacttcacatttcctccaccacccgcatggctgggccaccgctgcctccccacctcttgctctcggcaccccagagcgctggccttctttcagttcccccagcactgtcctcccacccactgtggggcctttgcacaagtggatccttctgcttccccttcccctttcatgtaagtatctcccactgccccctcagatctcagcttaaacaccacttcctctgtctcacaccacagacaatattgaggcccttgcaatgtgcgacattagctctctgcaggctttcccccgtagaatccatcacctttgtcatgacattttttaacatccaattgttgtcccatctgtccagtagcccctgtgcctcatgagggcagggtctgtgtctgtggtgctgtgctctctcctttctcgacctttgcccactctttcacaaccctcagcactgttctcctccccttccaccatgagtcacctggccagctcccatttttcttcaggactcagtttagacattgaatgctcctttctccacccctccaaggctaaggtagctatcccttttgaccctacagtacccctgcactcctttgccacgttgcattttttcttctttttttgagacggagtctcactctgtcgcccaggctggagtgcagtggcaccatctcagctcactgtaagctccgcctcctgggttcacgccattctcctgcctcagcctccctagcagctgggactacaggcacccaccaccacgcccggctaaatttttttgtatttttagtagagacagagtttcaccgtgttagccaggatggtcttgatctcctgacctcgtgatccgcctgtctcagcctcccaaagtgctgggattacaggcatgagccaccgtgcccagcccaacgttgcattttttctttttctttcttttttctttttttgagatagggtctcactctgtcacccaggctggagtgcagtgaagtcatcatagctcacggcaagcttcaagtcctgggctcaagtgatggtctgcagcctttccagtaactggaactacatgcaggcaccaccaagcccagctaatttttattttattttattttatttatttatgtatttttactttattttatttttaagtagagacaagctcttgctattttgcccgggcctttcttgaacttctgggtaccagcaattctcccgcttgtctcagcctcccaagatgttgggattagaggcgcggggacccacgtcttgcctgccgtattgcatttatggcactgtattgtcatggcttatttacttctctgccttctccaggagactctaagatccaggaagacaagggttgtgtcttgtttttccttcattccccagtgtctaggacattggctcttacagagtaggcactcaataaatacttgttgaatgactgaatgaaagaggtaatggtacatgaaaatgcttagaagaagctaagcatgctaaaaaatgtaagatattattttagccatgaggaataggacatgaacaagtaaagccccgaatccctgtccagcgtgaagctgaagacatgatgtattagggggtcccagtgcccacaggaaatcccacccccaagctaaaatcttggaaacaaggatacccctgagagcttgcccaaaccaaaatagaggatgtcagcaccggagaagccactataaaggttaggatgccttcctggacaaaataatggaacctggcaatcgaaccaaatcttcactgaatgtaaagaagagttactatatctggaagaaaaagtctgttcacagaggggtggtgcctggagcctggagagggaagtccagagaccctgcccttgcccctgtggctgcccgggctgccctgaccaactgcacatgagccgcaatgacgggagcccttggattccatagtgactttcctcacactgtgcttctaagtcagcttataagtacagtttgctgagctatctggaattttccctagagagagaatgcattggccaaccaatatgttctagcctgcttggcagttttatttctcaatgtcaattaatgggtctcttgagcacctgatagtgggaattagtcctctttgaccttctcccattggacttgctggcaaatctaatgttctagacctgagggccacaggctagagtcaaccatgctcacgacactgttatctctctctgactacaacagatccaagagttcaaacaaacaaacaaaaaggacgtttctcccttctgttaacttgtactgaggaggaaaagcatgtgttattattttgtttgtttgttttgagggccaactgtaaggatttttattttggtaggtagaggaaagtcctgttgaaaggtgcattaccagattcaacatttatactatagtctttgttttgttttgttttgttttgtttttgagacagagtctcgctctgtcacccaggctggagtggtgcaggggctcaatctcggctcactgcaacctctgcctccccagttcaagggattcttttgcctcatcctcctgagtagctggaattacaggtacgcaccggcacgcccggctaattttttgtatgtttagtagagacagggtttcaccatgttggccaggttggtcttcaactcctgaccttaagtgatccacccgccttggcctcccaaagtgttgggattacaggtgtgagccactgcgcccagccctatactacagtctgaattctgccttaggctgggcatggtggctcatgcctgtattcccagcactttgggaggcggagttgggaggattgcttgaatctaggagttcaagaccagcctgggcaacatggtgagaccccatctctacaaaaaatataaaaattagctgggcatgatggcctgtgcttgtagtaccagtaacttggagggctgaggtaggaggatcacttgagcccaggaggcagaggctacagtaagctgagatcatgtcactacactccagcctgggtgacagagtgagatactgtgtcaaaaaaaaagaaagaaagaaaaggaaaaaaaaaaaagaaaaaggagaaattctgtcttaaaacacaggatattgtttgtttgtttatttatttatttattttaagatggagtttcactcttgttgcccaggctggagtgcaatggtgcagtctcagctaattgcaacctctgcctcccacattcaagcgattctcctgcctcatcctcccaagtagctgggattacaggtgcctgccaccacgcctggctaatttttgtatttttagtagagacgaggtttcaccatattggccaggccagtcttgaacttctgacctcaagtgatccacccacctcggcctcccaaagtgctgggattacaggcatgacccaccatgcctggcttctctcataattttgaatttaaataaataatgcagattgactctgagctgagaaaaattttatttaatgacataaaattcgtattttacttgagttttacatttttaatgctcctttctttgacagaaaaagcagacagctctgaaagagaggcactcatgtcagaactcaagatgatgacccagctgggaagccacgagaatattgtgaacctgctgggggcgtgcacactgtcaggtaacccacttccacgaaaatcacctcatcaaaaagactgtagcttgatgacaaagaggatgtttgctctctctctctctctctctctttttaattctttgtcttttctcagtcacagtgtgaactctcaaacccaagtggaattagacactgagcactctataaatcagaggggtcaaaataaagaatgcctcattcatctgctttatcgtgatatattgcataattctcacctgcttaaaaacaacaacaacaacaacattgcaagtacatttggtggtgtctgtgcttctctcccagcttggaagctggtgcacaggcgtggtgagagtggttacagagcctggccactgccccagttgggctgccgtcaaatacggcacagcctagctaggatatcagactttactttcccagaattctctggggcatgccctctgatcttctctcttctgcctagaaatacccaaatgatgtgcccaaggttcattctttctgcagcagcaggcctggggctggtactaaaagaaaggaaaaagaggaaagtgaatctgagagaggactgggaatatatttctccctcctcaagcaaacagcaaatcagcatatagttaccaagtgttcacctataatacacagctagaacattactttcagttgccaactggagaatccaggaggccagtggtattggtgaggccacacatacaaaaaagggccacagagaatgtcaagaagatgctgctttccaaagaaatttgagcaaaagctgaaactgaatttaaagtataagaagagctaggctcagaaaaagttgtactgtccccaagtcagcagagaaccaagccctcctaagagtatgttgtctgctacatagacttctgaaataacagtttgctttgtgtatgcctataattgaaactgtaactatttcaggaccaatttacttgatttttgaatactgttgctatggtgatcttctcaactatctaagaagtaaaagagaaaaatttcacaggacttggacagagattttcaaggaacacaatttcagtttttaccccactttccaatcacatccaaattccaggtaagaggctgggtcagggtttcgtaattacacatcatagaacgtaggcaaagtgtgctgttcaaacacacttcgttgaccagtttctaaaggcaccgtgaagtctgtgggtcctgcaacctagagatttcctgaatctttgctatagtttccctgttgacatggaacgagtcctgtccctttccttcagtacaggtactatagctgagctagtctctctccacccatgcctgcatcacaccatagacgcctatttggtttggggaaaggtgcattattcggtctttcaggacacctggttgcctcacaggtattggtagaaagaatgaagactttttccaaagtccttaacatatgcaaagagagcagctcgggtcctgggactattgcgcaaaagaacgctgaactcaaattggattctaagatattaggatggattgatcgacacgtgatggggacacagtaaagtagcagtaaccttgtctctgctctgtgtttatcctccgcatccatggggatcctgagagatgcttggtcctgcagggatttattgctttagcgggcataaatgagggctgtaggagtttgctggatctcctcctcatccttgaactttcttgctaattacttgagcatcatggctttgtagcacctttctctgaatggattcccaggcattctgatggaggcattcgttgagccttggagcattcttttttttttttttttttttttcagacagagtttcgctctgttgcctaggctggagtggtgcaatggtgtgatctcggctcactgcaacctccacatcccaggttcaagcgattctcttgcctcagcctcccgagtagctgagattacaggcatgtgccaccacgcccagctaattttgtatttttagtggagacagggtttcaccatgttggtcaggctggtgttgaactcctgacctcagttgatccacccacctaggccccgcaaagtgctggaattataggcatgagccaccgcacctggctgagccttggcgcgttcttatttccctccctgtatggaagttctcccttattctgaagggtatttgtttattggagacttttttctttaccaggggctttttagggatacatttgagagtcccggctttgttttcttagaatgtaagttttaagtgcaggcctctggccttccaggtctgagacacagacccagtgtcttaaagccaccaggccccacggagatccccatgcacgtccgtgtgcagctgcccttaacctatgcatgcccgtcacaccgtcctctcctttacactcatttcccagctcatcgtctagaaatgagaactctataaagccactcatattctggaacagaggggctatcctactgagtccgatgtgtgtgaccagtatccactggtcagtacttagcccctttgattcgttctgttcactggaatattaaatacactgaaattattccttttggaatatttgtggtctgaaagcatgaagccatttcctaaagatatgtaaattgtaaattgggttaaactcgtatattagaataaattgaatcgtgatctacttataattcctacagagctcctcagggaagaatttttatataccttaaaagagatttgtattattgctatttattaatttcacagtaaaaagaaatgagctttacaaaggcaaactggaaaaaagaaggatggtgaaacgcttacgggactctcgggaagatctgtattatgtgagggaaagtgggctgagttcagaaaccaaagaatgagatcgatgtgagtcctggttccactcgaatcatatttatctcactgtgcctaatttctcttttataaaatgccacccatctcataggttgtggcaaggattgagtgaggtcctttttgaactgtaagattctatatggaaaacagggattacttttatcttagactggcaagcccagttacacagatgtttttaatgtacacaaaaaatggacaaatggatggtgtgcttttaatttaaaagtcaatttataactggaatccatttatttgatgaattacatttttaaaataaaatgtctgctgagaagaataatgtaaataatgaaaaaacaaaattttttaatagcatgcctggttcaagagaagttcagatacacccggactcggatcaaatctcagggcttcatgggaattcatttcactctgaaggtaatattttattctaagtagtagcactttaaaatggaaatgaatgcaaaagttttatgttagctattttttaaaagtgtgtaaacacaaaagcattttaaaatttgctaattgtcagatgatagctaaaagccagtttgtatactgtagattttatgtcaacattcaactaataaacactgaggactattttatttggtcagattattcatttaaagtcatatattaattacagccatcttattacctgacaagtggaagagataatgagttccgaagttacatagaatttggattaacttctgcttactttgctttctgactggatgactttggacaagttatgtgaccaccagaatcacaattttcttgtttataaaataggcctaacactaccttcctcacaggactgttagaaggagtaaatgaggggctggccgtggtggctcacgcctgtaatcacgccttgggaggccgaggcaggcaggtcacctgaggtcaggagttcaagaccagcctggcccaacatggagaaaccttgtctctactaaaaatacaaaaattagctgggtatggtggtgcacgcctgcaatcccagctacttgggaggctgaggcaggaggattgcttgaacccaagaggcagaggttgcagtgagctgagattgcaccactgcattccaacctgggcaacagagtgagacttcaactcaaaaaaaaaaaagaaagaaagaaaaaaaaaggaaggagtaaatggaagaatataaaatgcacaatatagtttataaaataggatagatgggccgggcacagtggctcatgcctgtaatcccaccactttgggaggctcaggtgggtggatcacgaggtcaggagatcaagaccatcctggctaacacggtgaaacccttctctactaaaaatacaaaaaattagcatgagcctgtagtcccagctactcgggaagctgaggcaggagaatccagttgcagcaggccaagatcgtgtcactgcactccagcctgggcgacagagcgagactccttctcaaaaaaaaaagggatagacaattaatattaattcctttcccactgtgacagccctacctagtgcaaaagagaagtatctaaaactcctgactaatcaatcaggaggtcatcggtcatcaaagcagttccaaagtttatctctaaccaaaacaagtctccagtgacccttcataggcagcataaacaggtcatctctaatgctgccgggaagataatgcgatagcttcatgtcttagcacctcacctaactctggcttgaataaccttcccatagagatttaataaggcaacttcttagagttttggcaaaagtgaagactggctctattttacagatgaaattgaatatgaaaaccaaaaaaggctggaagaagaggaggacttgaatgtgcttacatttgaagatcttctttgctttgcatatcaagttgccaaaggaatggaatttctggaatttaagtcggtatgctccttttaaagaaaaaacaaaccaaaaaaaagatttgaaaagatgtgcttatatatgttttcttgtttattttaacttgtatcccttaaagtctgccttttctcccctgttcactgttggagtcacctagcgtgttaccttggctcttggctaattgtagtagcataaaggcctgggatcccttgtgaggtcacggctagcacagccctcccaggctgcacaaagtcccctgaaacttccaaggctgaaggtcgagataggaagtcctcagaaatccttcctcaaaacaaagcgtagcattgtcagtccctttcagaacggctgttcaggttgtgccctgcatgtgggcattcaacccaggggatgagaggaggctgaaaccgagccagccaccctgagtgtctttgtctaattctcaccctgcgtgctgtgggctggcagcagtcctgcaggctcactgcctcctctgttgctaaccccagatccattcgttggtaaggccctggagcctgccgtgaaccatgtctctaccccaattttgcactctttttgaactgcctttccacccgctgttctctgtgatttcaaatgtctcctgcctataagcagatcatagcccactctctggctaccttccttcctcgtttgcttgcctttcattaccttctctttatttcccaaaattcttccccctcatttttcttgcagtcttctaatctcctcctcctcttctcctccacttccttccccttgcctcttctctcctgttttctctctgaatttggaaagactactttcaattgtatttttttgttttgttttgttttgtttttggagacagtctcgctctgttgcccaggctggagtgcagtggcgtgatcttggctcactacaacctctgcttcctgggttcaagcaattctcatgcctcggccttccgtgtagctgggaccacgggtgcataccagcatgcctggctaattttttgtattttaatagagatgggaattcaccatgttgcccaggctggtcttgaaatcctgagctcaagcaatccacctgcctcagcctcccaaagtgctgggattacaggcgtgagccaccacactcggccttttttctttaaaaaattactgcctcagccagatgttcatggtgtgtgtctgcagttccagctacttgggaggccaaggtgggaggattgcttgagcccaggagttggaaactgcagtgagctaggatcgcaccactgcactccatcctgggtgacagagcaagtctctttctctaaaaaataaaaaataggcagccgggcgtggtagctcacgcctgtaatcccaacactttgggaggccgaggtgggtgaatcacgaggtcaggagatcgagaccatcctggccaacacggtgaaaccccgtctctatacaaaaaaaattagccgagtgtggtggcgggcgcctgtagtcccagctacttgggaggctgaggcaggagaatggcatgaacctgggaggcggagcttgcagtgagccaagatggcgccactgcactccagcctgggcgacagagtgagactctgtctcaaaaaaaaaaaaattaattaaaaataaataaataggctgggcacagtggtgtacgtctgtaatcccagtgcttttggagggaagcccaagagttccaggctgcaatgagctatgactatagcactgccctccagtctgtctattcaaaataataatgaaataagcttaaaagcaataataatacaagttttaaaaaattactgtcacagtaatatttccacacctctgaactgcgaggcacatttttctcttcattttccccacctgctgtttggattcttcttgctcgcgcatcttgcccacctgagtctttctctatttcacttatacaactacaatcctgctttcacaagcattttgtttttgtttttgagacaatgtcttgctctgttgcccaggctggagtgcaggggtgtgatctcagctcactgcatcctctgcctcccaggttcaagcgatcctcctgccttggcttcccaagtagctggggttacaggtgtgcaccaccacacctggctaatttttttgtatttttgtagggataaggttttgctatgttggtcagactggtctcaaactcctgactcaagtgatttgcccgcctcggcttcccaaagtgctgggattacaggcgtgagccactgtacctggcccacgaacatctttatagaggtgggagaacacctacttagattgtctggcctggtttgctgcccatagctaagtaaatactcaaactactcccaactggcagtcaaggggcactgcttccccttcaaccccaggcttgtaataatatgaatttttgaagaacatccagtttcttaggccttctatccttttatcttcacatcaggcctcccctttgaatcatgcgtgtcactgtccccttcttgtctctcaccccctccctgatattcctctgggtgcccctcagtttcctctgtaggcccttgacttcatcaaacatttgttgagccccagctacatgccaagcactgtactagatgctggagatacagagtcagttatgatatgactcctgggctcgaagatcttatgaatgataggggagacagagacaagcagacatgcaagtcgaagatgacactgaggccgggggtgggtggctcaggcctgtagtcccagcactttgggaggttgagacggtggattgcttgaggccaagagttcaagaccagcctggccaacatggcaaaaccccatctctactaagaatagaaaaacagccaggcacggtggtgtacgcctataatcccagctacttaggaggctgaggcatgagaatcgcttgaattgggaggcagaggttgcagtgagcagagattgtaccgctgcactccagcctgggtgacagagtgagactttctcaaaaaataaaaataaaaaattttaaaaagtttaaaaaagacaacactgtagcatgataagtgttgtgactgaagtaagttctgggaacccaggggagggatctgcacagcagacctggttgggggaaggggagatgcagtggaagaggctttctgagggagtgcgtgcttcatgcttggactaatggagatttttgaaggaaaaggaaaaccagcagggaatgtgggataggataggaagcatggaatcaggaggagttttttttggagaaaggtaatgagttggacatactgaatgtgaggtgccttgagcaaccaagtagagcgtggtctagcagacacttggacacttctcctgtctgaagctcaagagaaatgtttgggttggaaatagggatgtgggcaatggtggttgcatccctaggtttggatgaaatggcttgggtgagggtgtgggttgtgaggatgcagccctcaggagtgagagtaggctcgtgcacaaagcccctgagggagacaggagccggcagagcagtggggagaaagcaggagtgaaccatgcgcagggttcccagagggaggaccagaagcgggaggggctggccaacagcagcagacaccacagggaggtcccgtcagatcgagactgtgtgggtgccaagccagtcagtgcaggcctcggccagagcagcttgggcagacaggcaggaggaggaggcaggttgcagacctggggtaaagtgggcaaagtgcaggtagatggcactgaaaaaactgggtatggaggagggagctctagaggggctgtggcacagggctgccagtgttcatggtgctgctttttattttttaaagatgaaagagtgtacattggacctttgctactagtgccctgttccccttcagatcttcctttgtaaagttcattttcttgtcagacccctttgattaacatcacgacatctttcagctcagggactccttctaattccagttcagtaaacctctccaaactcatttttagctttttgtttttccgattatttccctcgatattactccatttattcctaaagctattttccagtcagaaaagagatgctggccaggcgcggtggctcacgcctgcaatcccagcattttgggaggccgaggtgggtggatcacctgaggtcaggagttcgagaccagcctgaccaacatggcgaaacgccgtctctactaaaaacacaaaattagctgggcctggtggcgcgtgcctgtaatcccagcaactcgggaggctgaggcaggagaattgcttgaacctgggacgcagaggttgcagtgagccgagatcacgccattgcactccagcctggggaacaagagtgaaactccgtctcaaaaaaaaaaaaaaaagaaaagagatgctatttctcacacccacaataagagtactggaggacagctctgagattccctctgaaggctcaggggagggcccctgttggggagcctctcacttttgctcggaatctgcaaaagatctgctcctctttggcctctggggatgcttcagaagccgcacaaagaactgcagccaccatagctgcagaattaggtctcctatattcactttgtttgttgcacatcatcatggccgctcacggcacagcccagtaaagataagaggccttccatcaccggtacctcctactgaagttgagtctagaagaaagattgcactccaggataatacacatcacagtaaataacactctggtgtcattcttgacagtgtgttcacagagacctggccgccaggaacgtgcttgtcacccacgggaaagtggtgaagatatgtgactttggattggctcgagatatcatgagtgattccaactatgttgtcaggggcaatgtgaggctgctatttcctacttatttttatacggctattttgtgttgtgtcgttatcatggtaaacaactgcactcactgtggtgcatttttgatttatggtaacatcaaaaaaccctcacagcagtctgcttacttatgcttaaaaggtttttctgcagcttcagggaatcttccatctataataaaagctgagcaaaatagcatcacatctgtccttgggctagctagtcagagtagatcagttaggggcctttgagtgcaatcctcactttaaaaaacccaaaatctcaatacttgcacttagttcagttatcctagctataaagtgatgattgagttatgttttcaattatgtgaaaagctaatagtcacaataaagcactttaaaacatatatagcacatacctataaaatgttaaagctaaatacttaaatatgaattaatgaatatttatcatccttttactgttaacacaggaagatctaaaacatgagtgaattggctgggtgcagtggctcatgcctgtaatcccagcactttgggaggccgaggagggcagatcatgaggtcaggagttcgataccagcctgactaatatggtgaaactctgtctctactgaaaatacaaaaaattagctgggcgtggtggcgtgtgcctgtaatcccaactattcgggaggctgaggcaggagaattgcttgaacccaggaggtggaggttgcagtgagctgagatcgcgccactgcactccagcctgggcaacaagagcaaagctctgtctcaaaaaaaaaaaaaaaacaacaacaaaaaaaacagtgtgaattgacttggtaatgaaaaactaaggacagatgtgtttacaaaaagaactattagaagtaatagatgacaaaattgtgtagttgaaaatgtgtgtttttaaagaattacaatacctggctgggtgctggtggctcacgcctttaatccaaggcactttgagaggccaaggtgggagaattgcttgagcccgggttcaagaccagcctatggaacatggtgagacactcaactgtctctataaaaaataaaaaactagctgagtgtggtggcacacgcctgtggtctcagctacttgggaggctgaagtgggaggatcacttgagcccaggaggtcgaggctgcagtgagctgtgatcacgccactgcactccagcctgggcaacagaatgagacccttttttttgagaccctgtctcaaaaaagaattccctacttgtgaaataataataatattaaatgctgacttagtgcttactatgtgctaaacatctaagtgctttatgcatattaattcatttattcctcagagtacccacttggaaactgaggcacagaaaagtaactcgcccatggttacacagcatgtggacttgaacaggaatagtctgagccccgagtctgtgctaaccactatgttgtagtgtttcccatgagggttatgcacttacctcatagcgttgatgtgggaaaaagccaataaaaccaacgtgaaagcaccttgtccagggtgaacatccagtaaatgtgaaaagtcaaattaaactgtattcccactagaaacaaataatcatcttagctgatttacgatctactcctactcatcatagactgctcatatgtagtcattcagtttctaccccaccagctggttgtctcttatgtgggaaagtgaattccatttggaaccacaattaatttctttaattaatcaaattaaccagacttgcctgcatgaatcaatagctcatcagtttgcatacatttaaaagagggtttacttggctgattaagcatgtgctgattaaacatgtgctgtgaaggactcgtcaacccatgtaaaagaaaatcagtacagccaggtgtggtggctcacagctgtaatcccagcactttgggaggctgaggcgggtggatcacgaggtcaggagttcaagaccagcctggccaacatggtgaaatcccgtctctacgaaaaatacaaaaattagctgggcatggtggtgcgtacctgtaatcccagctactcgggaggctgaggcaggagaaccacttaaaccagggagtctgaggttgcagtaagctgagatagcgccattgcactccagcctgggcaacaagagcgaaactccgtctcaaaaaaaaaaagagaaagaaaatcagtacaaagctctgccccagtaacctacccatcttgtgtcttgattctagtctgagactatactaagtcaaaactccctttcatgctagtggaaattattaaagccacagaagccagactggtatcatttctggaagtgatgacgtgggctcccctcccgacattattgtggatgacatttccactaaaggtcttcccagaaatgctgtaacagaagatctcactaattcactagtacccacttacccctaggcaactgactggctattccttaatggaaagtacctctttccagtggaaagatggcaagttaaacttacccattccaagcacaagcctttgttcgagaggagttgtaaagaaatatgccttatgttttaggctagtattattagaatgttaatttgaaagtgaaaacctttcacgtgaggaatgtgattttctcaataaggcattaagagtggtcttaggaagatgatgcatttcatcttaatacaaaagaaaagaagtcatgtctgtatgtggaaaattcaccatcttatctcctctgggttttccacaggcccgtctgcctgtaaaatggatggcccccgaaagcctgtttgaaggcatctacaccattaagagtgatgtctggtcatatggaatattactgtgggaaatcttctcacttggtaagttgggcagctgctggcctcccttggctcctggctttgcatcctctgctctctcggtgccgccccacccctccccccaacactgatgggtcttacttgtattgcagcccatgactttatgtttatttgctggtgtcctttagcctgtcttcctcactggtctataacctgcttgagagcgtgaaccgtgacttctttttcccagccgcagcccgtgtgcctgcaacagtgtctggcacatggcagatctcaatacgtgtttaattgaatgaatcaataaacaaatgaagaaatggatgaatggctgcaattgtctaatgttttcctcaggtgtgaatccttaccctggcattccggttgatgctaacttctacaaactgattcaaaatggatttaaaatggatcagccattttatgctacagaagaaatgtaagttcaagtcagactgtaatttggttgaaatcagaaaggtacagtctgtctacttccaaatgcatgaccaaaaaaagtcaaactccttagtgcaaagcgtataggattctttttttaaaaaatagaagtgaggtcttgctgtgttggccaggctggtctcaaactcctggcttcaagcaatcttcctggctcagcctctcaaagtgctgggattacaggtgtgagccaccacacctggctgtctgattccattttaaaaagaaaagaaaactctttgttttgggagtttctgaacaaagctgaacctttcctgtcctcagaggcacctgcttcccggttttaattcctttgcttgagggctccatgaaggtcattcgattctatccactacgtcatgtttctttaaatgcatttctgcccatctgatttctcctttcggatatgaattcaaaatctggtagaggacttgccacaaaacaaacatgctgtaaataagcagctccagaggaataaatggtgcttcattatatggaaaatgatccattttgcttcattcagacttcttcatcttgttccttgttctattgcttttacagatacattataatgcaatcctgctgggcttttgactcaaggaaacggccatccttccctaatttgacttcgtttttaggatgtcagctggcagatgcagaagaagcggtatgtagcagccaggactttataaagctttacaaaggaaattggtaaattaaaacacttgttgctgtcttcctgtgaaccaaaggtaccaagttgtcattctcattgcagtttttctgggttgccctttcaaagttgtgtggggtaagactttatttatttgtttatttatttatttattgagacagggtctcgctctgtggcccaggctggagtgtgtggcgtgatcatggctcactgcagcctcgacctcccaagctcaagcaatcctccagccacggccttccaagtagctaggaccatgggagggcagcaccacgccaggctaagttttttattttttgtagaaatagggtatcactgtattgcccaggctggtcttgaactcctgggctcaagcgattcccccacctcagcctcccaaagtgctgggatcacagggcatgagctcctctgcctgccctaagacatattgataaaaatgtttttagggaaaaaaaacacctttcctgatttcagccaaatgattaataaattaaaagctcttaagagttcagtgcagtgaagtagacaactaaataaaactaaataaaaataatccctggcctccagaagccactagccctttcttatgaagcatgagtgtggaaaaatcacatgactcaatcatgctatatggtagcctggaaagagcattgacctggagttctgagggttgaataccagctgtaccactctgtctcccaattgtgtccattatagcaaatcactttacttctctaagcatcagttttctcacctgtaaaatgggttgttaagttagattatcttttgagctttgaggacttggaatttctttgctaacgcttcccccatcaacaccaccacctggtatagtgaaaagaaccatctccagatgaaataaataaaggagagaaccttgggctcctaatactgaggttcagatcttggctccatcgtttacttgataagtcacttaatcttttgggaagtctccttctcagtttctttacctgaaatatgtgattaacaaatctcacctcatggagttgtaagaaggagtaaatcaggtgatgtatgtgagaagagttagcacgtactgggcacttggtatttactccataaaatgttagttaaatataaatctgatttttaagtggattgtctgtcctcctttctaaattgttatgagtcagttttcagttctgtattctctatatagacctgggtagatagtgtgtactttcctactgctgtgatttttttgaaaatgacatggaaactaggttattgtcagagaattaggtcaaaaggccagaggaaatggaaagcccccagcagacttatagcctattgcacagatacctataaactgttcatgacaccataaggtaaactgaaagaagagtttagaatgaaacaggaagtgagctggtaaagaaagaatgtatatgtgcatgtatagctgtctagctatacactttttttttttttgagacagggtcttgctctgtcatccaggctggagtgcagtggaatgatctcagctcactgcagcctccacactgtgagctcaagcaatcctcccacctcagcctcccaagtagctgggaccacaggcacacaccaccggacccagctattttttttgtatttttggtagacacgggctctcactatgttgcccaggctgttctcaaacttctgagctcaagtggtccacctgcctcagcctcccaaagtgctaggattacaggcatgagccaccacgcctggctaagagaggactgattgatgttactcattgcatagttgggtgtggatttgtggggaacttgtgagctggatgtgaggactgagtagcatcttgtctgctggagagtagagggtgagtaggatattccaggatgaatgaatcatataaataaaagtccaaagttgaaaaagtagagtggcaagtagatggctgtgcctaatatacagggagaatgggggagtagagagggaaaaaaaagtgcaaagctcgtgtcgccaggatggaggcttcaggaccacttgggtcttggtttgagcttctcctttcctgtccccatactcacaggatgtccagatcccctttcctgtgttcagggggcctgtcaggtatcaggaaccgttgaatggcaacatatccatgcatgattaatcagctgagagaatccatgcttagggacagacggttcacaaactttttctcccagttccttccactctgttccctgaccctctgtgaccagtgtcagaagcacccagagaaaatggtagctcctttaagcaggttagaaaacaggcccccatggcccattgcagtgggtcacacatgtaatcccagcactttgggaggctgaggtgggcggatcacttgaggtcatgagttccagaccagccaggccaacatggcaaaatcccatctctactaaaaaaaaattagccaggcgtggtggcgcatgcctgtaatcccagctactcgggaggctgaggcagaagaatcgcttgaacctgggaggtggatgttgcagtgagccgagatggcaccactgcactccagcctgggtgacacagtgagactctatctcaaaaaagaaaaagaaagaaaaagagaaagaaagagagaaagaaggaaggaaagaaagagaaagagagaaaaaaaagaaagaagaaagagagaaagaaagaaagagaaaaagagaaagaaaggaaggaaggaggagggaaggaaggaaggaaggaaggaaatgcccccctccccgggtgggaggagtccagaggaaccccttacttagggctcatgcagcctgcctcagtctaagccagtctgaaggaggagagcttggcgtgggtctcagccatcttgcccgctctgctgggcacttttgtttggtgcaaggcacaacccacacagccacgcaggcagccctgcccactctgcagaatcctatctagtcccttggttggaaaactggccttgtcaccttccccagggtgatcttccctgttatatctgtgaaaggttttgtagaatcttctctcctcccctcccctcccctcccctcccctctcctctcctcttttctttttttttgagacagagtctcactctgtcacccaggctggagtgcagtggcatgatctcagctcactgcaacctctgcctcctgggttcaagcaattcttatgcctcagcctcctgagtagctgggactacaggcacgcgccaccacgcccagctaatttttgtgtttttagcagagacggagtttcaccatattgtccgggctggtctcaaactcctgacctcatgatccgcccacctcagccttccaaagtgctgagattacaggcgtgagccaccccacctggccctatttttctttttaatttattttttttagacagagtctcactccgtcacccaggctggagtgcagtggcgtgatctccgctcactgcaaccttcacctcctgggttcaagcaattatcgtgcctcagcctcttgagtagctgggattacaggcatctgccaccacgcctggctaatgcatctttagtagagacggggttttaccatgttggccaggctagtctcaaactcctgaggtcaagcgattcgcctgcctcggcctcccaaggtggggggattacaggcatgagccaccatgcccggccagaatctttgtttctgcatcaaggactagggaaggaaaagggccctcagagaaccagagagaaagagtgggaaatgcatggagaaaacataggttaaggcttttatgtctaacctcaacaccaatgggattagatcagggagatcactgattacatgattacctgtctaggcatttagacagtggtgaaccgatgaagatttttaggatggacaaacatgcttcaatctttaagaaccagatcaaatattctgtgctctgcaaagcctcccccaatttccctagtcagatttcaggctgctgcttctgaattctcattaacactttcagctgtaactccatgtgagactcaaatcctagtgtaggatgactttatattatgggtctctctctgtcgtcactagacttcattagcaagggtaaatactgtttcctgttcatctttacaccccatggggtagtgcttgccatgtgatattaagtaaatgaatgaagtcagcatgaaagcaagttggagaccacatctgtttggttcatcattatagaccccgctgctagcatgatgcttagcacgtggaaggcgctcagcaaacatttctggaatgagaaagaaaaagagagcataaaaggaagtttggaaaagcgaggcagaagatgagatgtcaggacatcagttgagaggggcggcagcagcaaggatgggcacgctgagggagcacactaggcaggggctgtgggctgataaaagggggcacatacttgtcccctgtttcagaaaaggggtctgaactaacatcacctcccctctcctactcagccccataaattataggaaataagtttgttttgttttaagagaagggaggccaagcgtggtggctgacactgataatcccagcactctgggaggctgaggcacaaacatagattgagctcaggagttcaaggccagtctgggcaacatggtaaaaccctatctctacaaaaaaatttgaaaattagccaggcgtggtggtgcattcctgtggtcccagctgctagggaggctgaggtgggaggatcgcttgagtctggggagcggtcatggctgcagtaagccacgatcatgccactgtactctaacctgggtgacagagcaagactctgtctcaacagaacagaactaaactaaactaaaataaaagtgaggccataattggctttgacagtaagaaagagatctttttgtggaccagaaactgtggaaaatccctgagacaatgaaagcagttaaaattgcactgcagagggaaaacccaccacagaggatgcctgggaaaaacaaggacaagggtaacacaaaggcagcaagaagtcctgggacactgcagaagttctgaagcaggagcagccacatggtgaaatcaacataagattaaatgtgggtgttaaaaatgtaagaacgatatgggtgagatagaaacgtaacacataacttctgtttcagtacaggggaagaaaatgaccatagaaaacataatcagtccaacaaaatgggggaagagaaaaataaagagagttcatggaaatagaaaacacaaaattagctgggtgtggtggtgcaagcttgtagttctagctactcaggaggctgagctgggaggattccctgagcccaggaagtcgaggctgcagtgagctataactgggctgctgcactccaatatgggcaaaggagagagatcccatctctaaagaataaaataaataaataaaaattgaaaatacaaaaataaaacacaaaatggcaacaatcagtaagcctacttaggaaagagaatctcagaataaataaagttgttaacatgcattgttagtgaatgccacattcactaatctcaatacaatgtaataaaaaaatcacccaaccaaaaaagcccccaaatttatataccaaaattaaaaatcagccaggcgtggtagctcacgcctgtaatcctagcactttgggagtctgaggcgagtggatcacctgaggtcaggagttcgagaccagcctggccaacctggtgaaaccccgtctctactaaaaagacaaaattagctgggtgtggtggcaggtagctaaaatcccagctacttgggaggctgaggcacgagaagtgcttgaaaccgggaggcggaggttgcagtgagcctagactgcaccattgcactccagcctgggagtgcaaacagaacgaaactctgtctcaaaaaataaataaataaaataaaaatcatgcctcttaagcaagtctttgcttaagaagaagaaggggaaagagggagaaggagcaaaaatggatattgcctattaaaacctgtgagagttacccaaattcataattctaaattcatttattagaaaacaaagaaaaatgaaaatcaatagctaacctttttttccttttttttttttttttttttttgagacaggttcttgctcattgcagcctcaaattcctggaatcaagcgatcctcccacctcagcttcctgagtactttttaaaaattctcttttgcagagatggggatcttgctatgttgtgcaggctagtctcaaactgctggcctcaagcaatcctcctgcctcagcctcccaaagtgctgggattactggtgtgagccaccgcacctagcctgattaacctttcaatttaagaagctagggaaaaaacaaacaacaataaagaagaaggtggagagagagaggaggaggaaaatgaacaaagcagaaagaaggaattaatagagatatagccagatttaatgacacagaggaagtagcaacagcaaaataatagcgatgatcaggaaaaccaaaagttgttttttgaactaataatgtaattgctaacattttttgagtatttaatcatagagtttactaatgtattagccacaaaattaataactcttaatcctcacctcaatctcctgaagtaggttctattattatccctttagcagactagtaaattgaggcacagagaggttaagtaatttgcctaaggtaacatggtaaatgtcagacttaggatttgaatacagcagtctgagtgtagtctatactgtatattaatattgtatatcaacaaagtatacaaatatactactaaagctactatctttgaagtgaacaattaagaaaaaaagaagtcgggtgtggtggctcacgcctgtaatcccagcacattgagaggccaaggtgagaggatcacttgggctcagaggtttgagaccagactgggcaacataatgggaccccatctctaccaaaaattaaaaaattaaccaggtgtagtggcgcacaccagtagtcccagttactcaggaggctgagacaagagaatcacttctgcctaggaggttgaggctgcagtgagctgtgattgcaccactgtactccagcctgagtgacagagcgagaccctgtcttgaaaaagaaaaaagcacaaataaataacattcagatgaaaaggaaacgataactaaggaaaaaagaaccattttttaaagtataagaaaatttatatacttctttataatgatacatttgaaaacctagggtttgtttcacaatttcataaggagaatgtatttaaaaagtcatttaaaggtcacttttatgatgttatctgtgagcctgttaaaaacaacagtggctgagggtggtggctcacgcctgtaatcccagcactttgggaggcctaggtgggtggatcacttgaggccaggagtgcaagaccagcctggtcaacatggtgaaaccctgtctctactaaaaaaatataaaaattagccaggtgtggtggtacacacctgtagtcccagctacttgaggcacaagaattgcttgaacctgagaggcagaggttgctgtgagctgagatcatgccacaacactccagcctgggcaacagagtgagactctgtcacaacagcaacagcaacaacaaaaaaaaaaaaaaaaaaggaaagaaaggtcacttaaagaaatggaaaagagtgatgtattacaactatacccagtaactagctatgggagtggagagagattgtcagagatggttctagaaacttctagacagtgagactggatgaagagcacatgttagttaattcaggtggaagattggaagtgttattggtatttgtgctacacaaacttcatgaggtggttagaaattcagtggtagagatgtacatttggattcaacaggttcaacaaatgctaactaactgctatgtctacttcacaaaaggcacgcatgagtagttactgttcatccttcagggtacaagcaaagctgtcattgtgcaacacctggttcacaatggatatattttgggtcaaaggatacacacacacacacacacacacacacacacacacaattttctagaaagaaaagtgaagtgtaggaggcagtctggacagttcacattaaaactgtcaaaaacaaagaaaaagaagtagacagtaacaagggctgtgggaacggaacaaatctataaaatttaaatagaatgcatgattcctaaatcataaagttcttataaacaaataataataaaaatgtatcaccttttaaaaacttatttcttttagagacaggatcttgctatgttggttagtttggtcttgaactcttggcctcaagcaatcctcccgccccggcctcccaaagtgctaggattacagagttgagccagtacacccagcctgtatagccttttatatacataaaaggcaaaggaaataggcaggctattcaaaatgaaaacaaatggacataaagtataggaaaaaggcccaactttgcagatagtgaaacatatatagttaaggagatagaacttcttgctcagcaaaagagaagagatgtgggaggctgacatacccattgttcagaaggctctggaaaatatagtttccaggcaccgttgataggagtagaaataaatacaacctttctgcagggcagcctggccttgtgtatcacagttcaagtgtgcatcctttttgatccagcaattccacttctgcttatcccaacgtcagactagattgagtgtgcacttttcagtttgtttcgtataaccagttggtcaaaaggttaattatgatgcatcagtactatggaactctaggctgccgtgaaaaaaaaatatgtggccatccttagtgaataatgtaaatatgtgacacaggcaacatatgagcagtataataacaatatattgataattcaaaataaggttccaaaatagaatatatagcctgagcccacagacacaaaattgtgtgtgcatagcaagctgtctataatggcgggtacttgtcatgacttgtagccttttttcttttttttgagatggagtcttgctctgtcacccaggctggagtgcagtggcacaatctaggctcactgcagcctccacctcccaggttcaagcaattctcctgccttagcctcccaagtagctgggactgcaggcgcgcgccgccatgcccggctagttttgtatttttagtagagacagggtttctccacgttggctaggctggtcctgaactcccaaccccaggtgatccgcccgcctcggcatcccaaagtgctgggattacaggcatgagccactgcgcccggccttctacgtctctttctgtatttctcaaattatctatatgaatgcatgttaacttcatatttgggaaaggaaagtaaatctcttcatttcagaaaaaaatatttaaaagtcgtgaaactccaagggaaaactcaagaatcagtcccttgtattaactccataatgaacagatttccttttgtggcctttctcttttatgatttttctgcatggttttaggatttctagggtgacattttatatctgagagtagactcaataatgaaataaaatatttgactatgatttgatttctccattaataaaaggaccaaaattgcttttttagttatatagaatatcctctgagacctatgcataataaaagtacttgtctacacgtttcctgaaaatatgtacatctattatatatcagtttaaacattttaaaagtgatgtctaggccgggcgtagtggctcacacctgtaatcgcagcactttgggaggccggggtggtgtgggatcacttgagcccaggagtttgagaccaccctggacaacatagtgagactttgtctttacaaaaaataaaaaaattagcagggtgtggtggagcctgcttgtggtcccagctactcaggaggttaaggtgggaggattgctcaaacccagaacatcaaggccacggtgaactatggttgtaccactgcactccagtctgggcaacagagcgagactctgtctcaaaaaataaacaaacaaacaacaaacaaacaaaaaagtaattgtctatatagaacaactgtttttatttaaataatttgtaatatgggcgcataacatgtgcatctacatcagatggtaatcagtgttctgtctctttcccacattcagatgtatcagaatgtggatggccgtgtttcggaatgtcctcacacctaccaaaacaggcgacctttcagcagagagatggatttggggctactctctccgcaggctcaggtcgaagattcgtagaggaacaatttagttttaaggacttcatccctccacctatccctaacaggctgtagattaccaaaacaagattaatttcatcactaaaagaaaatctattatcaactgctgcttcaccagacttttctctagaagctgtctgcgtttactcttgttttcaaagggacttttgtaaaatcaaatcatcctgtcacaaggcaggaggagctgataatgaactttattggagcattgatctgcatccaaggccttctcaggctggcttgagtgaattgtgtacctgaagtacagtatattcttgtaaatacataaaacaaaagcattttgctaaggagaagctaatatgattttttaagtctatgttttaaaataatatgtaaatttttcagctatttagtgatatattttatgggtgggaataaaatttctactacagaattgcccattattgaattatttacatggtataattagggcaagtcttaactggagttcacgaaccccctgaaattgtgcacccatagccacctacacattccttccagagcacgtgtgcttttaccccaagatacaaggaatgtgtaggcagctatggttgtcacagcctaagatttctgcaacaacaggggttgtattgggggaagtttataatgaataggtgttctaccataaagagtaatacatcacctagacactttggcggccttcccagactcagggccagtcagaagtaacatggaggattagtattttcaataaagttactcttgtccccaca

SEQ ID NO: 6 - DNA, 43608 bp, Homo sapiens
gagtaggcgcgagctaagcaggaggcggaggcggaggcggagggcgaggggcggggagcgccgcctggagcgcggcaggtgagcggcgccggtaccagggtcccggctcggggtccgggctggggaggggaacctgggcgcctgggacccgccgatgccccctgccccgcccggaggtgaaagcgggtgtgaggagcgcggcgcggcaggtgagtgcgcccgagggtcgagcgctggggccagccgggcagggcgcctcccggggtgctgggagagtgctgggcgcctgggaccccttgcgcacggccgagagccctcgccgcccctgttggcttggcatcgcgaggttggggcaggtggtcctgcgagtccctagccagttggtggaagagagtcccccggggtccccaaagctggctcctagtccgcctgccctccacggcccccgcctgggagcaccggtgcgccttttctctttggggaggaggactgggagtgctgtcggttggcttctttgtttgggggaaatctctgcagtcccgcagtgttacctgaactccttctgcttcttggttccctactgaggtagggagaaactggaaactcgctgagatgccgggaacgatacggccggcgcggcggggaccgctgggccaggctgctggagggcccccgggcgaggtgcgaacggccagtcagtctcggggagggactgctcgcgactcaggccccgttgcggcgacccgctggcggcgatcagggccggggcctcctggacacccggcaccggcaggaacccgcccgggaggagccggtctggctcctccgcttgcgctccgtgccgggttggggggaaggcggggcacctgggcgcttcggtccacctcatcctgtcctgcccggctcggcacagtggcaccctgagtggtcaagtgctccagtctggcagtgggcgctctgctcgagcacgggtccagctgaaaaactgccccatgtccagaaagtttgtgcgccgagagccctgagcgcttgtggcagaggagggccttcgcccgctccgccgtagagcacagcgcggtggccctgaatcctgttcagaacgccctggtggcagccctaatcacgaggaatcctggtggcttgtttgggaaggaaaggatagcacggcggcccgaggtgagccctgtgggcagggagcacccagggctcgccttcgaggctgcgcagcccttccctccgtgcgaacctgtgcagtggtcccgcgggaaagatgagcgcatcgcgcccaaggcaatgcctgacctcacggagctcccagccgcgagaacctcccgaatcatggaaaattacaaaggctacgcagcccagttacaaggcatttggaaaacctaaagtgagactaagtttgttgacctgtcccaggagatctgggaaggtactccaggaagtggggatgcagccagcctcccctgaaggaaggatgggggttgggagtgtggcagggagagtttaccagcgcaaagggccttggggacgcaagtagctaagtcagtcctggctcctgagctgctgctgtgaagggaggacctggtgggctaggtaaccgggagctcccccagaaagtcactggaggttgctcaggacttccccacctttactgagtgcttttgaagaagtaggacctgccctgctccgctacagaactactggacaggtgaggttagaatgaaacctagcaacaccctcgggtaaggacacactaggctggagagttcggggtgcaacctacgggctgagacctctgcctggagatggccatctacacctcggcctctggttatttttaattatcagctggtgagctggctgggcttttgttctctgcttggacatttgtttggtccccagcagcttcccttattcccaccagccaaggacaaccttctaacaacaagcttgtgctgttgctggagcctcaggcagggcctcccaggttgctaggtgctggcctgcctggcaccgttggccactctatcttgaactcaagtcaccttaattgtaggagtatatttggctgcactggcattataataataaccacagacattgatgtggcacttttttcagccaggcatcattgcaaaccctttataatgtacttaactcaattgtaaggaaactggggaagagaggttgggaagcttgtccaagatcttgtaacctgtaaggggcagaactggggataaacatggcctgtctggctccataggtcagtgcttccagtgtcgggctctgagttggagacacaggatgcttagaaggggctttagtgacaatcggcacagtacggattccttttgatccttccctgggttctccctccaggatgttggaatgttaccagcaagtggaggaaaggagggaaggaagctggaaacaaggcgcccggaatcctgattgaaaagggcttgttcctgggccaggctctggttctccccgacctgaaagagcccagcccctgcccacagccctacctgggctccgtgctgctccctctagcagtatgacatggccagagtgcctggaactctgaaagggggcctgcggagggctgacctcctaggccatgggggcattgagtgacaagacgctggtgcaaatgtcctgtaggtgaaaaggtagatgcgtgcagtaccttatgccagtaaccaccaccaccacgatcatcatcatccgagtgtgttgtccccctaccaggaaatgtaaaccaaaagtctggctgataactcttacccttttccacctgaatctgcggcaagattccctaggggatcttcgtaataatatgggatcattgccttggtcccaattattacatcagactctgagaatggggcccaggcatcttatttatttatttatttttctaagccctcttgaaaattctgggtttggggagcactgatcagatctaagccttggacattgaggtagaaaggaaaggtgaatggtcaatggagtgcttgttcagttttggttgctgaagacttggaaagtggccttgctagtggggagagtgagggcagggagagctccctgtggggaaccagagagcccaggagcattgaaggcccaggtgcatttctgctctctggtccctcctgctctgcactccctgagtgtccctcatcccacagtcaccaggcctttgctactcttccccgcccctccttactttccaggacacctgccaggggatcctccaatatgggatgcactgcgtggcctcaggattggggtgcaggagcattatgtacctgagagctgaggcctgtatggagtcagcctttgtggggcccctcctggccctaagggtgatttgggaagccctgacttgcaagcaccaggggtatgggcctgggtgtgaagaagggggcttatgatgtccccatggccattgaccaccttggccccaccgagcctgtggacacccaaggaggagcaaaagggggatctgtgacagggtagcagcttggttgagcacacaggcagctcttcagcatgacctagaacagaggctgggctccaggaggaggcagagcctgatctgggacttggttattcctggttgctgagcaatggtcaggagagaggaactgaatgagtggaaatgcgctggttgggagtcgaggctggttttctggcaggggtgtgggtggttacttttgttgtaaacagagtgaagtttgagagggcaggaaactcgaagacaggcttttcatcctcctggaggtgagtctgggagagggaggtgagggctctgacatctatgtgtggatggcgctgagccattgggcatccatggcaggagggcaggaggagtttagggcacagagttgtggtaagaaagcaggaagtgtttgaagggcaccttggcttgtggttgtggcagcagaagtctggaagttcactcaagggcagactaggtggaaaaatcggggctgtcaagtgggactcagaatgagaggttgtgacaattggatttgttagaaaaatattttcaagcgaggtctgacttggcagatggaactaagctgaggctttttattattgcttgtttgtacgaggtgcacaatgcagtgtcaaattccctttaaggccattgctttccaaggggctgtcctggcggggcactcagcctgaccccactgcagtatagcccaggggtcatgggagaccatgctttctagggacgatgggcttggagttctttgtgcaagatactgataacagagaatttgctgacattttcaagttcactggtgatgatgcatttataaggagttgggagtaatatgaaagatcactatgtctggtcttgatgctcaagcctaattctgttctggaatatgttggagaaatgatcctccagtcttgaaacatacatttttaggtttgaggaattcggtacattctaaggtagctccaggccatatgtgaactttctaattgttggaaccttgatttccccagatagaatccaagcctgctcttctggaaattctgatcatgattctggtattgtcctttggatgtatgcagaataaactgaattccttttccacatagccggctcttacgtgttggaagataaaccttatctgccatcattatgttattattgagtgctcaccatgggttgggcactgagctacggccttgctttctcacttaatccctgcaacaaccctatttctgtatcatccccattttacagattgacttggacaagttctttaagcctcagccagtggcttgtgtgtggtgttgaagtctccgcctggagtgacctgagggcctctgccgcctgcctgcctgtcatgccaggttgcactcagcttgaggcacctggactcctgggaggtcacccactgtcctgacttgggctgctggtgttgtctgggtgtgggcatcttatcgccctctgctaaatttcatcttactcatttggcctttggaactcaaaaaatatatattttttcctgcaaattgcattgtatttcaaatttacatttccgatcgtctgttgttggtatataaaaacacatagatttttatattgatcttgtatccctcaactttgccaaacatgcttattaatttttccccaatagtttttggggtacaggtggtaagaactccataaaaacatttaaatactgtctttgtaagctacaaagtgagatttaaaaaacaaacagaaagagagagaaccagacctgatatctgccctaaaaagtttgtaatctctttgggacaatgagtcattcacaggaaaagaaacttggatgatgcaggcaatacctctcctaaggtgatctttctgtttctcgctcaacctttctctctcagtagaactcttgtgccaatcattgtgtatgcaatttacctgattatacataaacaagtttctgctgaacagccactgaaatccactgttggctaactcatttagtcatgcattctatccttaggaggatagaacatctcgttgtataatgtgatattagtgcggttattttggcataaagggctctttttgatgatttggtcattggctgggatgtgtccgtggatggtggtggtggtgctgtctggattttgaagaaggggcactgagtctgaggctgtctgttccctctcacacctccagcaactcgaaccgtaccagtcacaggtgggggcttcgagaaggagaaggtgtgtgcacaatggtgcacggtgaggtcagtggagacttcattgcagagaatacccctggatcttgggtgggagtcagtgtctacaagcctaacttcattcgcgttggcttggttgtttggaaagtaagtctccagtaaacgtgtcctgagatctccagaggagagaaactaggagaaaagattcttgttttggcagtaacttcatcatgtcatgggatgcggatacgatgccacagcatcgtcctgctgcatggtggccaggcaggtgactcatgggctgactcagctctcagtccaggatggaccaaaacagtgcgaggacagctgtgtgccattgtgagattcaagtgggtgacactgtctgtattgaaggaagagctccctgccagccaggaatggagcctgagtgccacccactgttgctctttcacacttaaaggaaaatttccccaagtgctcatggtggctggctttccagaattgagagccatcatcccggtcctttaaatgacaggagcaagcattcgctaaacagcattgtctctcgccatctactttacgtcttgctcctttcagaaatgagttaatgcgatgtacaagcttgtgtgaatgaggaaatgcctgttttgaagatgaacaggactgaatgtgatttcctggtcttttcgggacagcagtgcttccccttgcagatctaatgtcagagcgggacattcccccccttgttttattttcaattggagaatgttgttgttgtttcttttttttttttttttttttttttttttgagacagagtctctctctgtcacccaggctggagtgcagtggcctaatcttggctgactgcaacctctgcctcccaggttcaagtgattctcctgcctcagcctcccaagtagctgggattacaggcacccaccatcatacccagctaatttttgtatttttagtagagatggggtttcactatgttggccaggctggtcttgaactcctgacctcaggtgatctgcccgccttggcctcccaaagtgctggaattataggcaggagccgccgtgcccggcccagctggagaatgttactggcagcatcactctggtcttccattccaaagtccatggtaactgacttgggcacacggaatatttttgtttatcatgttctgattgctggaagagataggattatcctgtgactgcctctgggtcccatggcttttatttgacaattaatggtggtggctcccggtgttccttccttccctggcttccttgttagggatcgtgaatgaatagcaagtgtgggttttgagtattgattcttcactcctttcagagggcttctgagctgggagagctgccaatgggatcgaattttcacttcctgaaacttcaaccaaacctgtaactggggagataggacagccgagaaaccagaggcatgaggatgtgtttggttaggcaggactctttgaaagcaatcttaggatggtactgagttctgtcctgcttatgagacaagaatgcgggatttattgtgttgtcaagcctgaggatcctctctcttcacaaagcagacataggcaaggtctgttaagatgtggctaaaaggcttaaacgtttttgatacattttaaatggtgatccttcccacctgtacattagtcactttcctttccttatacccaggaaggtgtgaactttagttttaatcctagaaaaagtcccaaagctacaacatgacctggttcttgtatttttatctgtaattgaagagtaaataaatgattggtgcatgtttgttgtaacctgttgggtgaggtttctcgagactaaaaagccatatactcattttcattcatggcaggctgttggggttttatagtttaatgattcagcaaccagttctgcttaggacacaggaaagcgatggtgtactgaagccggccccactctacttggctccgtggtgggcttcatgttggtagcctgggaatacttaccgaaggcaaacctgcgaatcaagacagccctcttttccttcagcaggttgttaaatgtttatcagctttataattcctcttatttaatggaaagttatatagcactcattttatgctaagcatgaagcacttcattagtattaactcatggaatgccctggaggtaggtgttactattatctgcatttgcagatggggaaactgaggcacagaaccttcaatagcttcctccaggtcatggagagtgagtggctgagcctgagtttggatctagagtctagtctcagaggtcaggggctgaaccgctgcccagtgctgcctgctgctgtttgagcacctgctttgtgccagcaactgggaaatattcttctgtggccatgtcacagacagtggacactggtctggccaggtccgaagcccagagcctcctccaggttcttgttccctcattgggaacatggtcttgtggacggataatcttgaaccccgtttcttaaaatattctttggtcatttaaagccaagcgggaaggggtggaaaaaagccctttatttgctcaggaaggtgcatgttaaagaaaaaaaaatcgtccaatgagacttgttaaaatggtgaagcgaactttattcaggaccacggaggcaggtacagggaccacagccagcagattttgcagtgggaagaagagactgggatccgcttgagtacagtatgggcaagtgggagttaatttataaccaaggatcagggtggggttggtgggtggaaaaatcacaaagagaaaacatcaagggtaagggggattctggctaaaccaaccaaacaggattcttgctgaagacaggctgggtgatcagacatcacctgtggcacggtggaggctgaggaacccgatcagatatccagagtgatcagataccgagggtgggaggttctggctaaactgactgagcaaggttttttgctaaaactggattttacaaggaaatgcacagatggcctagaaggttcaggagcttgatataagtttgatcaagcgaagaatctttgtccatggagagtgatgtcagaatgcggctttactatacagcatttcgtgttgacggcatctctagctattattgttaactgttcacaaaggacaacaagcaaaatggcccacagctttcttttcattactgctaatcttagcagtggtcaaaatggttggctctgaatttctttcttttttgggtttggggtagtaaatggagtgactgtggacatgttttatggattattttaagcgtatgtatctattaaaaattgagagggcccacatggcctgctttaaaaagtcaactgtgagctgtatttggtgctgagccctgaaccacccgctgggcagtgggtggctactggcagtgcctgtggacgttctcggggaaagacggtctgattgcacctgctcttcctcagttcctagtactgtgaggcactctttccccactctcccacaaccctcagcttaacacaactgtggtgattgctttgtccgttttcccatgaggaccctgagatttcaacaaggttcagtaactcacacatcgacacttccagggagctgtgttgccaggaactggcccaggtctttccctcctgggcccatcttgtccttaatctctgctgacattgatgggtttagttaccttgtcgtgtttcttcagtgttttatgccatacagtctcccttgagtagatgttctgtataggggatatcacagcttcctggtgagaactgggttaagtccagcaggatgcctgggcttagtggcactggagttgtgggtggccttgagccccaggcagtcccctgagagcccttcccgatggatgtttgagtcactgagtgtgttccttcttctttctggtcaggctgtcctggccgctgcacttacaattgcaccccatcctcctacccactctgatcccagaggagagtgcttctgctgtaacctctaaggcacaagtgggtcccaaagtccttaaatatggagggatgtggggaagcagtggtgaagatgcaggccaaaggtcagcaggcaacactggtctttgttgtaggtaaccttcatctagagattcttctagttctttccagatttatcttctaaaaactaactggtatggaaatattacagtcctgtaattctttcttctaggtcatattgaacattccagatacctatcattactcgatgctgttgataacagcaagatggctttgaactcagtaagtggttaattattaccttcctggccttttctttgttcccttgtcccttctgttattcccaacattgtttggggtcagcaattgcaagggctatttgtagggaacgccgggccacgctgatgctgttcaaggcaccctctagaaagagtgagtcaggtgcgcagccacacagctgcccaggtgagtcgcaagagccatggctgttgggtacacgtgggtgatatgcattctcaccttgacctcatcccttcctgctttgcagggcagggggcagggacaaggagtggggacagatgaggcaggatggcgataacaggggtatgttccagggaagagacccacgtgggatcccatcgatgcccaactgaaggactaggaaaagtcataactgcatgaggcatgggcgggccttccctctccctggagcccactccctttggagacaaatgtggctaatctctgctccccattgtaactggcccgtttgccttatacctaaaataagtgcatttagtaaagagttttaaacacttcctagattctatatctggaaaatagaccttgttttcccctttatttgttactgatattcattttttactgggtctgtgtttaatttcaagtccactgctcaggaattttcagggacaaacctgcttgctagtggatggcaagttcttagatggctgagattgcagcctctgactccctcatttagatgagagattaccttgtgttttccctctgtgtgctgctctggttcagagctgtaatcttcggacttttgaaggacagcattagtgagttattaagtggaggtgaactctgcgggccttgtttggctcattccattgtaatcaacttccctggaggcctcatttaaagttctaagagctatgctgcctctgctcagaacacctgtccattgagtacaaacttgctgtcattctctgaggtcaataagagacaaggggcaggctgggcgtggtggctcatgcctgtcatccagccctttgggaggccgaggcaggcagatcacctgaggttgggagttcgagaccagcctgacaaatatggagaaaccccgtctctactaaaaatacaaaaattagccgggtgtggtggtgcatgcctgtaatcccagctactcgggcggctgaggcagacgaatcacttgaacctgggaggcagaggttgcggtgagccaagatcgcaccactgcactccagcctgggcaacgagagggaaacactgtctcaaaaaaaaaaaaaaaaaaaaaaaaaaaaggagagagagacaagaggcagaaattaatgaataggaaaaagttttgcatgggggcccttagatacagataagaggaaaacgtggcctcccagagtggcccagccaacaggtaaccggggagagctgaaagaaggggaagatgtgggctggtggggcccagagtggcctgtttggggcgagtcttgacagggtaggtctcgggaaggcaatttttaagtaggctgaggaaggggaggtgggcattctaagaagataggcaccagctgaaggatggagctgagaataaaatgctacttctaggcagttcctttcacatttatgtatggccacactctgacccagaaatttcatttaaagggatttagctacacctttctaccctctgcacaaaaatgcatgtaatgtgtcagaatgtttattgcagcagagctgctaacagcccatgttgtgaaccactcaaatttccattaatagcagatggtgagtgaatgacgatacattccttatatgagagaagaggatgtagaagaggtatttgcaggataacacagagactatgctcctttaggaacatttcttcactcagtttttttctctgcaaaatgtttgtattaattcatacctgtgccagtctcgctggcagcgggagggattatggtgagcgctcaaggagattatgagtacaggagcctggcggcagctgagttctccaatgttagctattattcttctcattataattatgatattgctagtttacagttttgtatatcaatattcaaggaaaagactggaggaactaaaagtacaggattttggcttaatggattctaactccaaacctctacacaactttttaaaattattactatattttactaaatcccaatgtctgccacttttttttttttttaattttaaagaatacatagcccattgggcaaacttgggtttgcatgcttggcttttcagcagatgcagaagccctggggtgggtttgccctggcttgtgtggttctcgagtttgagtctgtacgtcttgagtgggtcaggggccccagagctttgctgccattgatttctccccaacagcagacaaagtctcacaatgacctcaattttccctctttctttcttttgaaggacccatttttcatggtacttgtcttgactgttttcatagtggttttttttttttttttgagacgggagtttcgctcttgtcgcccaggctggagtgtagtgacgtgatctccattcactgcaacttccgcctcccgggttcaagcaattctcccgcctcggcctcccaagcagctggaactataggcgtgcaccaccatatccggctaattttttgtatttttagtacagatggggtttcaccatgttggccaggctggtctcaaactcctgacctcaggtgatccacctgctttagccacccaaagtgctgggattacaggagtgacccactgcgcccagccaaatctgtatttttgtatgtagagggaaataattttctcaactgtaatcgtgaataaatattgtattaaattgtcatgaaggaactcctgtttaataaatagacatgtaagaaaaaaagaatgaatagtaaaaccaaaccaaaacaaaaaactttggtaattgaaagttctggttagtttttattctaaataagttcaatgtttgacatagttgtagacacctagggagaatctgtagtacctcttcttttctattacttttttttttttttttgagacatagtcttgctctgtcgccaggctggagtacagtggtgagatctcagctcactgcaatctctgcctcccaggttcaagccattctcctgcctcagcctcccgagtacctgggattataggcgcccaccatcatacccagctaatttttgtatttttagtagagacagggatccaccatgttggccacgatggtctcgatctcctgacctcatgatccgcccgcctcggcctcccaaagtgctgggattacaggcatgagccaccgcacccagccttgtagtacctttttaatatcttgtcactttcttattaatctctaactgtacaagttgtatagacaggatgcatatttcacaaaataaaataaaaacattatcaatttaaaagatcattggtatagctgtggtatgatgtgatagtttgtatgtaaccctttagtgcaaataagagttttatattattcatcttcttttcaactgtttaggggtcaccaccagctattggaccttactatgaaaaccatggataccaaccggaaaacccctatcccgcacagcccactgtggtccccactgtctacgaggtgcatccggctcagtactacccgtcccccgtgccccagtacgccccgagggtcctgacgcaggcttccaaccccgtcgtctgcacgcagcccaaatccccatccgggacagtgtgcacctcaagtaggattctctttgtgtttatttcctgtaataaacccggggtcccgggtctacctccccagtgggctctctgctcccaacaccactgtcgccacctctcctggtctgacccttctcctccgtcttccggagccagcctgtcttcatgcctttccactctcttcctgctgggtcaaagctgtcgctgccaggcctagcctcttgcccagggcctgcagatacctccctcttccgttaactctcctgtacagctttgcctgttctactcagcgtaggcttcgagatcaccttctctgggtttcttggctgtgtggtttattggtggctgctcttgaataaatggtaagcttccaagagcagaaatcaactatcttacctttgtcatacagtcccctggatatgacaggtcatgtttaagatgctctctgttactttgtgtttagtagatgacctggctggtgcggttgtcacacagaagtatctgagctgtctcattgggcttcagggtcctgcgggtggccggagcaggccagagcgagcgtgggaggactggaggttaaattttatttgctgtcacttcagtccctcctcttcctcaccctaccattcatctcctttctttgccatttcgtttggtctcatgtctttccagtccgcccctcttgcactgcctcccagctgttaattcaggctagtttcagtgctaagaattgtccaggtggaacccgcacagcagtggctacgccaaagatcttttacattgatcttttaattgatagtgcttttattttattttgtgaaatgtgcatcctgtctctacaacttgtacagttagagattcgtcagaatgtgaatttccatgtgtccacatcacataatcagtcatcaacgtgattaatgccagtgctctgtgaagccctgtctgtccccacctctcccccactcaggacaagtgctgccgctcctgcgtttctacccctcctctcaccccctcacccttcacaaatggctcttccaccctgttcctctccagccacctcctgtctctgagttttctaccccttcatgagccttaattcctttctctcccttctctcattctctctttcccttcttccgatgctccccaccaagcagatacttgtgtttgcactgatgttcttctgggggtggttgggtaggtcaaggccagtggttctcagtcaggacaatttggacccccagagacaattggcggtgtctggagacagtgtgggtggttacaagtggggagggggtgctgctcctaggtaggcaccggggatgctgctcaacctcccgcaaggcacaagacagccccccgacagcaaagaatcctccaggtaaaatatcgcttagtgtggaggttgggaactcctgatctttgtccaccgtggggatggaaggaagccagggtgaaggggataaggaactgtctgtgtgagctacccccctaagaaatggcagtgaaggccctctcctgaagtcagcatctccagacggtggtgttcccaccagtgatggctaaacccaggaaggcagacgaacccctggcccacatgatggacacatttccacgtttcctgggaaagactagatgatgacagagttggacagggatatatcagtcccttatcagttgcttttataagggaagaatatgaacctacatgtatgatttttgcattataaaatttataaactcagaaataatttagtaatttaattgaacttaccctggtactatttttaagaaaacactgttggcatctaatatatagaaatgtatacattttgaaagtgtaatgtttggctttgaaactcttctcccagttattgagtagcaccaattcagaagcacccatcaggagtataaggaatttttctagacttaatgtatttatttgctttagcaacagccgtagaaggttgatgattgagtaggagcgaacacacagcttaaaccttaggctttggagaatcgaaggtccatagtcctccaaatgtgcgtgtgaaacaagcagctaaacgtgagaaaccatgaggctgagttgacaaccttaagttggtcatgattgagggaaatggatagtgggttttgtgtgcgtgggttttttttgttgtttgtttgtttgtttgttttttgagacaaagtctcgctctgtcacccaggctggagtgcagtggcacgatctcagctcactgcaacctctgcctctcaggttcaagcgattctcctgcctcagcctcctgagtagctaggactacaggtgcactactgcttctggctaatttttgtatttttagtagagacggggttttgccatgctggccaggctggtctcgaactcctgacatcaggtgatcctcctgccttggcctcccaaagtgctgagatccactcccaaagtgcatgggtggtatgagccactgtgccgggccagtgagttgtaattaaactgtgcaacagcagccgtgacaagccaagacccagtggtgtctgtactgaccacgcgctgactacagatgcctgtccagcaaagtaaacttgagggcttcccgctttacacactctcctggtgagaactgtacagattggcacatgctcagtgtgaggttcaggatacctaactgaatagccctcatctcagcagaccagttattttatcttggataaaatggcactcgggaagccatagacggaggaaagtgtccttggtaatgggccagagagggcatctggaatttctctcatgaactaccttggccccagcttgcctccatcatatataatcattgcagccgagttatgagaacatcgtgtgcctgggcatggccctcagaccagtggtgctggcctcatctgtgagcctgttagaaattcagattcaggtcgggtgcagtggctcacacctgtaatcccagcactttgagaggctgaggcgagtggatcacttgggcccaggagttcgagaccagcctgggaaacatggtgaaacctcatctaccaaaaatgggccaggcatggtggtgcacatctgtggtcccagctacttgagaggttgaagtggaaagatggcttgagctcaggaggtggaggctgcagtgagccatgattgtgccactgcattccagcccgggcaacaagcaagaccctgtctcaaaaaaaaaaaaaaaaaaaaaaaatgcaatgcagattcatgcccgacccccaactgaaacagaatctctggtgatgggaaccaccacattccccaggtaattcttaagcctgtaacagtttgagagtgatggtagaattatcagaatgttgtcacaaagagagaggtatggcatcgagccctcagcagatgggtcagctctgagcttatcgccctggcagacctccggaggcacaggtgtggccaggtggggagttccaggctgccacaccacctctccagcctgggagggtctgttcaaatgccttctcctcccctctcctccacctctgcacctttcttcagggaaagctcctgggagctcctggacctggggctgctgggcatcactggggtgatggggatggatgccctccctcctggcccatgagctggctgagcccagcgtctgactctgccatgcctctctggcacctgtagctgtcttctgaactctgtgtgacttttggcttaccctctgaccaataatgctatgtctcactagagaaaaatcagtgaccttttccaaattcgttttttttctgaaatgtgcctttcctctgagtttggtatttctgcacttggaccaaaaggcctgcactggcgctgtccagcaggacttagggacaccatgggaaggttctacagctgcactgtctgacatggtagccaccagccacatatgatgactgagcacttgaatttacatcattttacttaattccatgggacattaattaaatagccacatgtagctttggtggatgtccgaatgggacagtagcatccattcgctaaatagccttgggtaagacaatttattctgctttgagtaccactaacagagtgatgatagtttttaggacagtattattattttgcttatgcttgtaattaccaagatgaggtcttagttctttttttttttttacattaatcatctgcctattttaagaccctcttttagcatactatctttttttttttttttgacagagtttttgctctgtcgcccaggctggagtgcagtggtgtgatctcggctcactgcaacctctgcctcctgggttcaagtgattctcctgcctcagcctcccaagtagctaggattacaggcacctgccaccacgcccagctaatttttgtatttttagtagagacgaggtttcaccatgttggccaggctggtcttgaactcttgacctcaagtgatccacccacctcagcctctcaaagtgttaggattacctgcatgagccactgcgcccagcgaagcataccatactttttaaaagagcctaacctcggtgtactttgctgaagatcacagcttcctcctgttggtctccaaattgcataaggtttagtgttatggaagaagtaggatcgtccatgatatttcttaaaattaaaagtcacatttttaagtgtatatgaaataattatttcttaatgtggtgtactataaaaataatagataacatttgagagcatgacttctaaacaactctggtctgaacgttgcactctcctccttcttccagagactaagaaagcactgtgcatcaccttgaccctggggaccttcctcgtgggagctgcgctggccgctggcctactctggaagttcagtaagtgcagggagcctcgatcccaccatgtgctcctgcagtccccagtgctctgagccagaccctgctctctgggctattgagacctctggaggccctccgtgaggttcctctcttacataacgaggctgtctctcttcccttctcttgtttagctatgagattgacacatcatggggaaagcatttagaatgtacccagtgctttggggtgcttggtgccacccagcactgtgagcacaggttcttctaccttggggccacacccagttacctgtatctcactgcacagcagtggctgttggggaccaggcccacccctccatgtcccacctcctgcaactgcagcctgagccttcccatcagcctggggtggtgcagacccatgtgccattgtggatccttcaagttacctgtgtggcagagaggacgtgtgagtgccgtccaaacccaaacactgagagggtccttcccattgcccccacggaagtaaggtgccccagtgctaattccacttatacttgctggtggcaaggacacttctcctccttattaaagtgggggattggctgggtgaggtggctcacgcctgttatcccagcactttaagaggccaaggcaggtggaccacctgaggtcaggagtttgagaccacaagcctggccaacatgttgaaactccatctctactaaaaatacaaaaattagtcaggcgtggtggcgtgcacctgtaatcccagctacttaggaggctggggcaggaggatcacttgaacccaggagttggaggttgcagtgagccaagattgtgcccctgcactccagcctgggtgacagaatgagacttcatctcaaaaacaaaacaaaacaaaacacagtggggccaggagttggaggctgcagcgagctacagtaatgccacggtgttcctcactccatgaggctcattgcgtttctcagcctgaagggcacctctcttctgttttctctgcaagtgggcagcaagtgctccaactctgggatagagtgcgactcctcaggtacctgcatcaacccctctaactggtgtgatggcgtgtcacactgccccggcggggaggacgagaatcggtgtggtgagtcagccttgaccttgggaagggactcctctgctcaccttggagacagcagccgggtccaggggcctttgggtgactgggcctggcgtgcgtccagtacgctgacacatgatgtcattgaatccctgctccaggctgagccctggggctcagagaggttgtgtttccggcccaacctcacccagcaggtgggagatgacagggccaccgaggactgtgtcattggaaccacacgtgctctgaactgccacaggaagtcagttaagatgagcaaactgtttataaagttggagatgcaggctaggaacggtggctcatgcctgtaatcccagcactttgggaggccgaggcagatggatcacctgaggtcaggagtttgagaccagcctgaccaatatggtgaaaccttatctccactaaaaatacaaaaattagccaagcgcggtggcgggtgcctgtaattccagctattcaggaggctgaggcaggagaatcacttgaacctgggaggcggaggttgcagtgagctgagatcacgccactgcattccagcctgggagacagagctggctcaaaaaataaattaattaattaaaaacaaaattggagatgcactatgttattttcaaaacaagctgcctttaaagatctatctgttgtcacagggtgggctcatctgtttcattttattttctgtggtttatctatttattcattttaatgaactaggaagcattgctcctatttatggcataccacatgatgtttggatacgtgtatgcctgtggcatggctaagtcaagctagaacatgggccttacctcatatacgtgtcttattaagaacacataaaacctactcttgtagtgattttcaaatatgcaacatatagtttattaactgcagtcactatgatgtacaatagattgctcgaacttattcctcctgtctaactaagattttgtgacctctgaccaacatctccccagtgttgtcaccccccgcccccagcctctgatagctgcctttctactctctgcttctgtgagtttgatgtttatacattccacatgtaagtggcctcatgcagtgtttctgtctctgtgtctggcttgttcacttagcgtaatgtcctccagcttcatctatgttgttggaaatgacaggatttccttctttcttgtggctgaatagtattgccttgtgcatatacaccacattttctttatcccttcattcactgatggactcttaggttgatgtcatgtcttggctgttgtgaaaaatgccgcagtgagcgtgggcgtgcaggtccctcttcaacacacggatttcctttcctttggatataaacccagcagtgagattgctggatcacatggcagttctgtttctcaccttttgaggaaactccatactgttttccataatggctgtagcaacttccactcccacccccacggtgcaaagtctccatttctcttctacaacctcaccaactcctgttattttccatctttctgatagtagccatttgaagaggtatgagatgatacctcattgtggttttcatttgcatttttatttgtatttttcatgaatttttgagggtgatttcaagggtagttagtgactcgaacagggaaacgatcctgagtatgagggttgtgctaatcatccccctcctgccagctgcgtacggaatggggctctgcagatggcagggagctggctcgtttctctttaagagctgccttttacttttcttcctcttcctttaaaacttatttcctggccggacgcagtggctcatgcctgtaatcccagcactttgggaggccgaggtgggcggatcacgaggtcaggaattccagaccagcctggccaacatggtgaaaccccgtctctactaaaaatacaaaaattagccagacgtggtggtgcgggcctatagtcccagctactcgggaggctgaggcaggagaatcacttgaacctgggaggagggggttgcagtgagccgagattgcgccactgcactccagcctgggcgacagagccagactccatctcaaaaaacaaaaaaaagttatttcccaagcacagccatgtattccaggcttgtggatcagcgttggtggtggtgtgtgctctcatatcttagttccagctaagcacactctgacatgtttacactagaaccatttgttttttctagaaatagaaatttcagaattgtagagtcagaggacttaccagaaatctcttaggtagttctcctcccctccctcaagtgcagtcctaacctcctggagttttctgtagaaaccacaagcctcagagctggccgagaattctagccaaagatttttccatgccaaagtaatcccccctctcctaagggccatccttggtggggactggtttcctgttaagccctcgctgtcagtcctggctgtggaatttcctggtgaggagcactggcccgtggagctcggccctcgtgccggccttgagcaggcccaagtgttccgtgttcttgatacctttcctccagcacagtcttgcttcccagaaaaaggtttgcacttgaaaatgatgcatttgctgattaaacatagttcttttgctttatttggtttctaaaataaagtgggagtttttgagattgagtagcgtgaggttaagatagcacgtggaatggctttttcttttctttctattttttttttttttttcctggagacagggtttcactctgttgcccaggctggagtgcagaggcatgaccatggctcactgcaacttcgatgtcctggggttaagcgatcccccagcctcagccccccaagtggctgggactacaggtgctcgccaccacacctggctaatttttgtattttttgtagaaaatgggtttcatcaatgttgtccagactggtctcgaactcctgacctcaagcaattctcctgcctcagcctcccagactgctgggattacaggcgtgaactaccacgcctggcctggaatggcttttgatgttctcctatgtgcacatgtgggtgaataaacaccaacaaagtccttatgttacctgaagagttgctctcttcttaatatttaagtcgtatttatttaaatactttaatagttgtacactattaaagtattattaggtcaaaatcaaggaagtacaaaagggtatgctgtgaaaaatctcttcttccttgctctgcttacttacctaccccgcatccccccatacaccccagacacacacacacacacacacacacacacacacacacgcatcactcccatacatgcccacctgtttaccagccaatcacatttcttggggcaactcatctgagttgcttctctttccagagagtttttgcataaagaagcacaggtatttctgcgttaccatgaccctatttcccagtggttcctagccagttgactctcctgcactggataccatcctggacagcattccttagggaaatgagccccctgttttttcccaccatggcacagttggtcctttgcatggacgcaccattattgcccctgtctcttcttggtggaccttaaggttttctccatccttttgctgtaacacacactgctccaagtgtgtgagcatatcagtaggaaacgcttccaggagtagaactgctaggtcagagggcgtgtggatctgtaacctgacagacctagaccggcttcagtttggttttatccagtttccatattgattattcatataaaaggaaacagacaaacataacgctgtgcatgtattctctcttagaccagaacaggcatagggtgcacttttaatttgtccatttcgtagagtagaaattgtttttgctgaaatgaacaccttaggatgctgaagaatatgacccgtcccatggaaaacattcaaaaatgtgtgtagcgctttcttcccaagggtgtgtgtgcgcatattttaacactaattcactttctacttccgttgctatcctttctgtgagtctttctcagaatctcagaaaagaaactaaattgttcactctagttatcaatgctgtactctatacctggaatttgctaaaagggcagattttaagtattctcaccacagaaaagagaaaagaaaatggtaattatgtgacgtggtggacatgttaactagctttattatggtgagcatttcacagcggatatccagtcatcacgctgtacacattaaacatgtacaattgggtttttttgagacaaggtctccttctgtcacccagtctggagtgcagtggctcagtcatggctcattgcagcctcgacctcctgggctcaatccatccttccccctcagcctcctgaaaagctggggccacaggcatgtaccatcatgccaggctaatgcatatatatttatattttttggtggagatggggttggtctcgaactctgggctcaagtgatcctcccgccttgcccttccaaagtgctgagattacaggcatgaaccacagcaccaggcctacatgtaaaatttttatttgtcaactatactttgacaaagctgagaaaaaaaatcctaatatttaaaaaaaaaaaaaaaaggactagcttgagaccttttccagctctctggcttatcagctgccgtctcttccgggtgcagatagctggaagggaaagaaaatccctaaaattacccacaagccaagaatgaagtgtctccctttgagccacagtggcagttttgtttttaatcatagaagtgtattttgagccgggtgtgctggctcacgcctgtaatccccgcactttgggaggccgaggtggggggcggagggggtggggatcgcctgaggtcaggagttcgagaccagcctgaccaacatggagaaaccccgtctctactaaaaatacaaaattagccggcgtggtggtgcatgcctgtaatcccagctactcatgaggctgagtcaggagaatctcttgaacccaggaggtggaggttgcggtgagctgagatcatgccattgcactccagcctgggaacaagaaaaaaaaagaagaagaagaagaagtgtattcatttcagttacttttaaaaaagtgaacagactttatattttagagcggttttaggtttacagaaaatgaaacagacagggcagcgagctccttgtactcctccccagcacacagttgccctgttatgaacatcccacatcagtgctgtgcgttcattaacaccgatgaacctgatgcatacattatgatgaactgaagtcctggacttcaccctttctcttgtacagttctgtgggatttgacaaatgcataatgctgtacagccacaatgatagtatcgtccagagtagttctcctgccttaaaacctcttttgctgcacctgtttctctctccccactcaccccagctatctgatcttcttagtgcctccgaagttttggtcttttcaggatgttgtagcgttggaatcatggagtatgtagccttcaccacatacaccttccttcactttgttggcttcctttacttagtaatatgcattcaagtttcctccatgccttttcatggcttgatagctcatttctttttagcaccaaataatattccgttgtccagatgtagcacaatgtttatccattcatgtaacctgtgaccgactcacagataggatgtggaatcactcaccacagaggcattagacaataatcagacccaagtcatttcatgggggaacaagcccacaggtaccagactgtccagtgagtcagggccactcgtaggaagtaagaagagaggctagagcatagccaggtcctcactttatactttaagcccatgtgtatttctcccaaaccacacagcattgtttccatgctttcagctttgcatgaataacgtgatacttgaacgcatcatttatcacttgctctctttcccacagcgctgttttcaagcttcttcctgttcatgatgctctgcttaacccttaagctgcatgggattctgttctgtgaatacgcccaccccatgtattatcctgcccagcaaaaagtccccaaaactctggatggtggttacctctagggagggagagaagagattgggaatagggagcgacttcaacggtgtttgtaatgttttgtttctttaaataaaagagctgagatcatttcagcagaatgttgatttagagtctcctggacaatttgttgctcaaagtgctctcttaaagagcactttaaaaaaaaaaaccttttatcttattatttatttatttatttattgagacggagttttgctctgtcacccaggctggagtggagtggtgtgatctcagctcactgcaacctttacctcctgggttcaagcaattcccctgcctcagcctcccaagtaggtgggattacagatgcgtgccaccacacttggctaatttttgcattttagtagagatcggtttctccatgttggccaggctgatctcaaacgcctgacctcaggtgatctgcccgccttggcctcccaaagtgctggtattacaggcgtgagctaccatgcctggcttatcttatatatttttaaaaacagcttattgagatctaatttatgtaccataaaattcaagtatataattcagtgcttttatatataaaacatatatatgaaatagcttattgagatataattttttatataaaacagcttattgatatgtaatgtatgtaccataaaatttaaatatataattcactggcttttatatattcacgaatatgtgcaactatcaccacagtcaattttagcatattttcatcagctcataaagaaaccccaagcccttgaactatcaccccatatccctcctcccagcccgtccctcctactcataagcaaccactaatctacttagtgtctatagatttcctactctaggcattccatgtgagcgggatcatgcaatacgtgggctcacacaatataagtggcattccatgtgagtcggctcatgcagtatgtccggctcctttcactgagcataaggtcttcagcactcatccaggttgcagcctgtgtctgaatttcattccctcttctggctgaatcgtattccattgtgtatcttggacatatcctattctgctcacccagccgttggtgggcgtttggagtgttttcgcctttcagctgttttaagagggttgcagtgaacatttgtacaagttttggacccaatgcctgttttcaattctcttgtgtagagagcactttttagcagaaaaagaatagatttgtggcctccctttgtgtgcggtcagtgccttgagaagagtgaactgtgctgccacctccggagccgtggagagcgcggggcttgggtagcagctaggacgatacaagttgggacaaggccaggtgcaatggctcacgcctgtaattccaacactttgggagaccgaggcagggggatcacctgaggtcaggagttcaagaccagcctggccaacatggtgaaaccccatctctaataaaacagaaaaattaactggacggggtggtggacgcctgtaatcccagctactcgggaggctgaggcaggagaatcacttgaacctgggaggcggaggctgcagtgagtggagatcagaccactgcacttcagcctaggtgacagagcgagactccgtctcaaaaaaaagaaaaaaaaagaaagaaactcatggataatcctccctctcgtgcagttcgcctctacggaccaaacttcatccttcaggtgtactcatctcagaggaagtcctggcaccctgtgtgccaagacgactggaacgagaactacgggcgggcggcctgcagggacatgggctataagtgagtatggggcagcacccgccgagtgacagtaacagacagcagaaacacgagaagaccctctctctgcctccctgtgaaagcaccggcacatgagtgctggggacaattgtcaccttccaaaagctgagccctataaccagcaggtggaatttgtcctgctagggctgtgcccagcacacagaccttggctcactgccaccttgccctgcctcctccttggcctctatagactcctggttgctcgggagtgcccagtgctgtggtcatctggtcagaggggtaggctgagggcgttaggtgcctctttttccaaggtgcctctcagccagggtccattcacctccctgggtagaggttggaccagaacagctggcgaggagggttgggctggggagagcagcagagacaaatcctgtgccagtttcacttcattcgggagccatggaagccttttgagctggggagagaatcaatcaatcagactgatacttaaaaaatgtcattcctgctcgtagctctgagggaaggtgggaaggcttaacagggtgtgtgtcgcctgacagtgattcctaacgggggtggggcggtggttaccatttaccagcactgcctggggagatgcggcagccctcaggcatcgggggagagggtggtaggatgctactgccactttgttttccatgggagggtccccaggtgatttctatgcaactttagggtattcaatatgccagttttcagaatgaattaccactcggtgagaaagttggcatcttagctagtcactgtgacatccctaaacagcaggggtgaattacacagcaaagcccccccatcacagtccaggaacctggtggaattgataactggggccatgttaacatctgtaccttttattagattaaatgtgtgtatgattatacaatcctatgtccttctcatagtttcttgatcctaacctggataagaaacacgaccaatgaaggaattttgtctgacactttagggttattgaatcgaaaaatcgttacaatattctagcacttggttagaacgtgtgattttttttcctaaatgctaaggtttttccctcttattctgaatgtcgtatgagcggtattatgacatagtataggatttgtgtttgcttatgccttaaccattatcacaaataaggttttcttttttaggaataatttttactctagccaaggaatagtggatgacagcggatccaccagctttatgaaactgaacacaagtgccggcaatgtcgatatctataaaaaactgtaccacaggtatgcagcaatttcttcttgaaaaattttggaatgaaatcaactaggagacaccatggggaatcgttgtcctgagtctgatttctctgagctgcaatactcggtctggatgggttttgcattgggaggagattagagtctgaccaggcctggttactctaagcagcccttggtttattcataggaagtggctgaggtttctctgctatttcattttcagcctctaccgtctgcccttgttggtagcggctcacacttgcaacatcgacattcaactctatttagttttctttcctcttcagacatttagaggtgtacctattttgtcagggcgtggttctaggaatccaagataatgtctcagtgtcccagccagggtgaccggctcattccagtttgccagggacttcactggcttgagcaagggaagtcctgctccattccaggcagctgggctggctggtcccgttagccccaaccccgggacagcagtgccagagggtgctctgtgagggatgggcagcattctggcggcctgggaatgagttgtggtgtttccagggggtagaagtgggtacaagccacaggtcacatgatgagtggctgacctggctgggagggcagaagaggggatggacttaggctcttccttttgctttgcacatatttaggatgtttgcagacttgctatgattgttgctgttatgtgttttctgatgtgaaagatacacagtgtcctttgcccatgagctctccttgcctcccaggtccccagggcttatgcctggtgtctaggcatcacctccctgcctgccaggtgccaggtgctgcatttcgggggaggatgaactaatcaccccgcgccacctttcctctgagtgggagcctggggcaggtttgcattcctggaggccgctggtggaggggtctgggggcctgacttccactgcagcctgctgtcctggggaatgtggcagggcaagcccagtggggagggctgtgcacggccaggtgcacccatcaaaacagcagggctgcggtttgtccctgtggagaagctaaacacagctgcctgggcactttgtaaatgctgagtggttctttgtctttctgggttacacacggaatcagggagccaagtccagccgggcagggacggggggaggggaggaggtgctgccgtcccttggcaagagccttgggaactcacaaggaggctggagggcttggaagaaagaagagaaggccattgtctggtaggctctattctatctcggtggtggtggtggggggaggcgcacttcttttcctctttctgtgcagcagttgccctttgatgcctgagttcttggcttgttttctgtcgggcttctgtgaataaccacatgtgccctggcgctgtgaccacacagggctatccctaccgaccttaggattcttaggaaatgtcttctcttaaaggggacatgtcttcacttggccgtgtcagtgccccagagccagagtccacctggaatgcacctgtagtcactgagaacccggggggtgtgccttagtaagaaggtgtcaggaaggacctattattgtagggcctgggctcctgcaaggtggtttgggggtggttggaggaagcagagatttgctctggattggatgctgtcaggaagcaggggtaattctgtgaggctgctttattattttttttctaggaggaggttggaatgaggctaggctaaagctgtgattggtaaagaaacgtccgtcgctcaagttagccaggacaggaggagacatcagatcgtgattttgtggttgtgagcacaaggttcctgttctgtctgttcagacatcatttcggaggaggctccttgtgtcttgccccatctcaggcatggaggggcctagtccgatattgacgctcagtgaaataattcaggttccgcagagcacacggcccagctatcagggcgggccagctctgcatgccaggggccgcgtcttcccttctcagcatagcctgggaaattcactgcaggacaaaatgcatcagttacttcctcttcatccataacctgggatgtttgactcccaaatgagtaactcttacgtttcttctaatcctagggaaactattggttatattgctttcaacactacaaatttaaagcagttataggagcccagaggtttccaaatggcttccttaaaaattagaagatgattttaaattccaagaggaaaaacaaaactagcattattgtatacttaccctcacaaccgtcctaggagctggtacaattttaagagaggttaagtaacttgcccaaggtcacactgtggggatgtgagccgcgtaccttggctcagtgtctggtctttgccactgtccctatatggatttacttaccttattggagttgtaactagcagacccttctatgtctcagaagacaggagagggaacatcggaagaaatgactgatttctaagcatgtgagaggcaggtgactccgcactatcgtgaccagaatttcccctgttctttttgcagtgatgcctgttcttcaaaagcagtggtttctttacgctgtataggtaagttcatctggagtcccccttttgatacttctaactaggaaaagctctctactttcagaacagtactccctgtgtctctgggggcgtgggagggaagaaggtggggtcacgggttggaatgtgcccagcggcgtctcgctctttccaaggagctcctggtttagatttccatggcctgtagacaccttcagccttgggtccaagggacaccccctgagatcaggcacgctcaagaagctgacaaagccctacactttatgccacccatgagctggaggcccggcaggtctctttctccagaaagcaaaggggggtggcgttagtgagccctggcagccacctaacgtggacttggagcatctgcggggctgtggtccagcaccaccgtgtggccaccaggtgctcatcagccagtgggacccgggaggagggacaagaccagagaacaacagtgctcttgcctcttctctcctgaattttggacggtggcttagacttgggtgtccccatctctgtgtttagagtgcttacagtttccaaactgtttgcaaatgtggaagccaccgtccctctcctctgggatggcccagtgctgtcgtggggccgtggtcctgagctcagcttttcatttgaagaggtggaaggagctgacaccgtcccatcccggcagggctggctcaggtcttctttaggtcctgagtgggggtccagcacagccccaagggtgcgtggcacccgccctgccctctgcccatgcactcatctcctggtggagaagacactcacacacaggaagcagggaaggcagcagacctcactcacccctcaccccctcactcaccccctactcaccccctcaacctctcattcaccacccaccccctcgccccctcactcaccccctcactccctcaaccctcactcacctcctcactccctcaaccctcactcacctcctcacctcctcactctccccctcatccctccctcaccccaccccgtcacctcctcactcacctcctcaccccctcactcacccttcaccccctcactcaccacctcacctcctcactcaccccctactcaacccctcattcacccctcaccccctcactcacccctgcaccccctcactcaccccttcatccactcacccacctgctcacctcctcactcaacccctcaccccctcactaatccctcactccctcaccccctcacgccctcactcacaccttcacctcctcactcaccccctcaccccctcaaccccttacttaccccctcactcatcccttcacccctcactcaccccctctctcacccattcaccccctcactcatgccttcaccccctcactcacctcctcactcacaccttcacccctcagtcaccccctcactcaccccttcaccccctcaatcatgccttcactccctcactcaccccttcaccctctgaattactccctcatcccctcactcaccccctcactcaccccttcaccccctcacccaccacctcacccacccctcacccaccccctcacctccttacccctcacccccctcactcacccctcaccccctcactcaccacctcacccacccctcacccaccccctcactcactccctcatcccctcactcaccccctcaccccctcactcaccccctcacccacccctcacccaccccctcaccccctcactcaccccttcaccccctcactcaccccctcactcaccccttcaccccctcactcaccacctcacccacccctcacccaccccctcactcactccctcaccccctcactcaccccctcaccccctcactcaccccctcatctcctcactcaccccctcacctcctcactcacccgctcacctcctcactcaccccctcgccccctcactcacccctcaccccctcaccccctcactcacccctcaccccctcgccccctcactcaccccctcgccccctcactcacccctcaccccctcaccccctcactcatcccctcacctcctcactcaccccctcacctcctcactcaccccctcacctcctcactcaccccctcacctcctcacccaccccctcactcactccctcaccccctcaccccctcactcaccccctcacctcctcactcaccccctcacctcctcacccaccccctcactcactccctcaccccctcaccccctcactcaccccctcacctcctcactcaccccctcacctcctcactcaccccctcacctcctcactcatgccctcaccccctcactcaccctttcacctccttgctcatcccctcacttaccccctcacttcgtcaatcacccccccacctcgtcaatcaccccctcaccttttcactcaccccctcactcacccccttacttcctcacttacctcctcaccccccactcaccccctcaccccccactcaccccctcaccccacactcaccccctcaccccccactcaccccctcacccctctcacctcctcactcaccccctcacctcctcacttatcccctcaccccctcaattaccccctcaccccctcaattactccctcatcctttcaattacccactcaccccctcacctcctcactcctcactcactccctcactcaccccttcaccttctcactcacctcctcgtctcctcaccccctcactcacttccagccctgcccctcccatcttccttttctttgtgtgagaatctggggtccctgagtggtgtcagtccctccaagactcaaggagtccccagggccttgttatccagaacacccccacctgggtcccgggagaccccatgggatcacaggagtgttcagggaagtggtgcttcctgggtctgggtgggctggaggggcatcctcccttccccaagaggagacccccaggagccccctaagtccatccccagcagtggtgcccctgccctgtccttgcagcctgggagacccttgggaggggcgggcgctgggtggctgggcggcttctgctggtctcaccccactggcctcctgtttgtcatcctcagcctgcggggtcaacttgaactcaagccgccagagcaggattgtgggcggcgagagcgcgctcccgggggcctggccctggcaggtcagcctgcacgtccagaacgtccacgtgtgcggaggctccatcatcacccccgagtggatcgtgacagccgcccactgcgtggaaaagtatgccaggggcggcgcgggccgggtgggggctcagggctggcctacagccaccctgtgaccttgagcaggtctcaacccttgcagccccggcatccttgtgtttaaatggggagagtattgcacctgcttcctagggctgtgagacatcaagtgcgctcatgccaggcagtgcatggctgtatgcactgagtgtcccctgcacgcagggcacagggtgcaggtggaacattctccacgatgtcgccgtgaccagcgttccttccagccactgtcctctgagctctgtcctgcccttgagcaaagcccctgccccctgaggtatcctgtctccgggacgctagtcccaggagagggcacactcagacaggcttcaggctgccctgctggaaggtccctggggttaagcgttcttggccacagcattgctcatgcagagggttaggtaggggtgaggctagccgtgacagtattagcatttatggacgctaccaccccctccccttttccttaaacacatagtgcttttggtcacatgctgctttggaggaggcctcacttggcggatgtatttttctgccttagagagaggctgaactgggtttgactgttggcccagccctctcttgctgcgtgcccttagacgattcactcaacgtctctgatccatggcatgtacaactataagatgggcatgcccttctcctctcgggctgttatgaaggtcaaggaagcaagggctgttacccaagggtgctcccttctctccccctcttcacacccccaggtgctctgggccctctaggaactgggtttctctcaagggctgttacccaagggtgctcccttctctccccctcttcacaccactgggtgctctgggcccactaggagctgggattctcttaagagggaaactcttggataaaggaaatggtttgattgatatcggacaagtctgttcattagtatccatttattaagcacctaccatgtgccaggaaatgctttggcgtacaaaggaaaataagggccagtcctgctagaaatggccttgaaaccccagggagggatgtcggcccattgtgggtgctgcagattccttgaaggtgatgcaagagccagaaagaaggatgatgtggggggctgaggcagggagtcggggttgggggagtgtgggggagaaggggagaccgagcacctcttccactatctccctgtgtggtttttggtgaaccatcctgcctctgggtgtcttgcctccagcttctgacgttggaagttcatccactgagagctctgtgtttatggctctgagatactgagtccttcttctctcccagacctcttaacaatccatggcattggacggcatttgcggggattttgagacaatctttcatgttctatggagccggataccaagtagaaaaagtgatttctcatccaaattatgactccaagaccaagaacaatgacattgcgctgatgaagctgcagaagcctctgactttcaacggtacgtgtggctcaggcttggcaagcaggttggcagaatcttaaagagatgttgattggaaatgacacttgtgctatgccaaatggaagggaggcatttgcgttgagcgagggtagcgtgcagcgggtggccaatgggagaggctcacagaggctaagagcacctgccgcattttgggggaggcagcagccaccacatctgttctgtactgtactgagtggtggtgattcaagccaggcatggaaaaggctagaacagggctttcccactgcagcacccttgacatctgggtggttctctgttgtagggctctcttgtgccttgtaggatgtttaacagcgtccccagcctctacccactggaggccagtagctaccaagctgtgacaaccagtgttgcctgctgacattgccaaacatccgctttgaggcaaagtcacttccagttgagaactactggcctaaaatgtgtaaagatccttgatttttaaagatacattctaaaaccaagttgcttaattcaggacaaacatgctttctcttagcctcttattcggtcccactctggtccatccaagggtctggaatgttctagccccatgtggatacagaagaagcaaaacctcagccctccctacagcatgtctgtattcacattgggaaatggttcacatatagaagagcgaatgcctgagcaatggcgtggtgcctctggggcgaaagctgactccattgactccatcggctttttggctgttgcctcctgtgtgtctttcccgtcttgatcacctggagatatgtaattttggaagcagagctagcaaataattcctcttataagcagagctagcaaataattctacttataagtagcataacgtcttgcctgccagaaggagaggtctggcagggggagaaagtgagaatgtgggacttgttgggatgcagggtcctctgggcagggtggccagggtgccaggcccagcagcctgcatgtgggaaggccaggtggagacataggtgatacccgcctggctcactgtgttttctcttcttgaaacagacctagtgaaaccagtgtgtctgcccaacccaggcatgatgctgcagccagaacagctctgctggatttccgggtggggggccaccgaggagaaaggtgaggctgctcctgggcacacaggactgcagggcccacagatggagcattgggttcggaagtgggaggtccaggttttaatcccagttctactactcaatgactggatgactttggttgattcccccagtccttgtgcctcagtttctccatctgctaagtgggagaaatcctgcccagcctacctaatacactgtgttcttatcgtgatcacacagagcagcatgtggaatggcttttgaagtatctgggccatacgagtttagaggtgcaggatctcctgtgttgcactcattgtgagtttagagctgccctggagatcccaccaaggcctgcgtggctgagtgacagggggcttggtgaggacgggcatcctggacccatggtggccacatctaagcctgtcctctgccctgataaccacagagagaggctctctccacccacttcctttgcaatctgcatttctctctgacagtctttcaaatgaagggagcctggctgcttcatttttatggagggttggaagtgcttagtggcaggcacaaaggttcattttacatattgtttatatccttctcaaaagcgtctaggccatacagacaacaaatcctttcaaacaaggggaaaagtacaaaggttgggtgatttctggggagcgtcagggaaggtagtggggggcatcctggctcctcatcagcagaaacttactacagtagagccacaggctgggcaaaagacctcatggaatccaagatgaagggaatatcgacaaatatttgtgcgcacctgcacctagtacaggctgggtgctactcaggtgctgggaatgcagaagtgaacagagtaagacaaatgtctctgctgtcaggagctttacctctcttctggatgtcggtggtggggacggggcaggtgtggtcagacagatgggagacaaacaactgagcgaggtacttccaaacatctgagggtggggatcacaaggtcccggctattttgaaggggtggtcaggaaaggcttctcggaagaggtggcatttgagctgagactcaaatggcaaaaatgtgtacacatcaaaaaggctagtgcatgtatcttcaggtgtggtcaaggggccaaggaggtgggctggggccagattgcataggtccttgtggattatggtgaagacaccagcttctcatctgcttgaggtggggagatcgtgagccggggagtgccatgatctggcagctgcgtggggagtggggatgaatggatggagacgaggatgatggtgacaagtccattgctgtggttccttgagacaggaagccagctcatagcagagtgcgggcgtggatgtgaagagatgagggtacactagggctagagccaccagacttactgatgggttgcatgtctgtgggagagagagtgagaagtcagggacgatggctttccactctgtggctgaagccccagggtggcgggtggtgccatttttcaagccaggaaatattggttggtgagaatttggggtgggagaaggtgtgacggagggttctggttttgcacactaagcccacggtgcccagaagatgcccgaggggaggcagcaaagcgagagtgggaaatgcagaggtggcaagtgcaggccgtgtcttgagaagctctaatgtgcaggggagccgagaagcaggcggcctagggagggtcacgtgtgctccagaagagtgtgtgcatgccagaggggaaacaggcgcctgtgtgtcctgggtggggttcagtgaggagtgggaaattggttcagcagaaccaagccgttgggtgaataagagggggattccatggcactgatagagccctatagtttcagagctgggaatttctttccctgaagctgaactccagagctgcattcagcacaggcaccgccagttgtaaggagaatccaggtttcccaggagaggggttggtgctgggatgagctgaccggggcagggctggaaaatagggctgtgaccatctgtgtagtgcgtgtggaggtctcagggagggaagtgtgctctccctgcgagagctgcaggcaacactgggagctcaacaagtctccctgtccttagggaagacctcagaagtgctgaacgctgccaaggtgcttctcattgagacacagagatgcaacagcagatatgtctatgacaacctgatcacaccagccatgatctgtgccggcttcctgcaggggaacgtcgattcttgccaggtaattcaacatttttattctacctttggtccttaccagatcctactgaaccccccatgagagagagggcattcttggggtcagcagagcctcctcagtgacacggagccagctcggggcagtcatgggaagtgacggccacaaacagtgcgaacgcttctggtggcagaaggaagtacagtcaacaaatcacacacaccctctgaaaaaccggtatttggtaaaagtgccagtggaacagaaacaagtatttagactattttaaattatgaacggcaatttatttagtaacttttagcttgaacagattaaaattcaggatgggggctatctctttgggggttacatctctgttaccatcaccccttgatggtggagattcgaagcccacacagtcactcgtaactcacactgcgacccccgccccccaactcctctaggcctggtcagtggtgtgcggcagattgtgacttgattttctgctctctgtaccttgctgtgtcccacagggtgacagtggagggcctctggtcacttcgaagaacaatatctggtggctgataggggatacaagctggggttctggctgtgccaaagcttacagaccaggagtgtacgggaatgtgatggtattcacggactggatttatcgacaaatgagggtaactatcctgtcctccttctgactgtgttctccgattcctcgagccaaagccagacatctgttaggcgtggttctgctgctggaagctgactggtgaccactggtcagcatgaagcaaactctgcttcctccagccacagccccatccccccagtgtccacccattgcccattgcctctcactggcttcacttgcatatttcccctggtgtttggatgaaaagcgctggggctcagcttgtgtgaaattccttggtgctctgccaaccacacttcgttctggctcagctgactcagctgttccacccaggccacctcacatcaaactttttttttttttttttgagatggagtctcactgtgtcgcccaggctggagtgcagtggcacaatctcgactcactgcaacctttgcctcctgggttcaagtgattctcctgcctcagcctcccaagtagctgggactacaggcatgcgccaccacgcccagctactttttgtatttttagtagagatggggtttctccatgttggccaggctggtctcgaagccctgacctcaggtgattcacccacctcagcctcccacagtgctgggattacaagtgtgaaccacggtgcccggcctcacatgaaacttttgatttatagagagcagagggaagagccggctgtgcccatccttttctggggccatcgagtggctcctgggcagcccccaaggttaggaagggcaggagcagccagggttctctgatgccccagactcaagcacgagggaaggtctcaggggttccatgtgagcctcatggatgtctctgcttagcagagccctggctttgggcattgtccagatagggggtgagaaccagatcttctcatctccaggacctcagacgtatagttttctcagatttctgtgctttctggggctgggctactagtggaagaaagcagtctattctgtcttctcccaaatctcccagatgcccagtctgttgaaggaggagcagaaccagggggcctttcccgctgaggcccgacctgtgtctccttcaaatgacacgcgggactcagggccttcccatgaccatggggcccagggggcgtcacctggcccagggcccagtgctagaaacagatgaccccaggaggaggaggcagggcaggagggaagctggcagggctgggatggtcagccaggctgaggggcggactcgcaccaggatggagctaggaaatgatccaggtgtgtttggcggctgcaggtgggtccgcatggctgtgcagggagggaagggctgcgtggcaggagagcagccgggggaggcccagactctgctgaagagatgcctgttgtgccggcctccacatccgctgcccgctccttccggagctcctgccccgccatgctcagcctgactctgaccaacacgttggagagaagaatgatccctttgtgctattaagcttgcttatttggtttctaagtgcttcatgcgaacctagaggaaaaaattattttccacctttgtttgtcttaagaaaataacacacttttttttttcctatttgaacaggcagacggctaatccacatggtcttcgtccttgacgtcgttttacaagaaaacaatggggctggttttgcttccccgtgcatgatttactcttagagatgattcagaggtcacttcatttttattaaacagtgaacttgtctggctttggcactctctgccattctgtgcaggctgcagtggctcccctgcccagcctgctctccctaaccccttgtccgcaaggggtgatggccggctggttgtgggcactggcggtcaagtgtggaggagaggggtggaggctgccccattgagatcttcctgctgagtcctttccaggggccaattttggatgagcatggagctgtcacctctcagctgctggatgacttgagatgaaaaaggagagacatggaaagggagacagccaggtggcacctgcagcggctgccctctggggccacttggtagtgtccccagcctacctctccacaaggggattttgctgatgggttcttagagccttagcagccctggatggtggccagaaataaagggaccagcccttcatgggtggtgacgtggtagtcacttgtaaggggaacagaaacatttttgttcttatggggtgagaatatagacagtgcccttggtgcgagggaagcaattgaaaaggaacttgccctgagcactcctggtgcaggtctccacctgcacattgggtggggctcctgggagggagactcagccttcctcctcatcctccctgaccctgctcctagcaccctggagagtgcacatgccccttggtcctggcagggcgccaagtctggcaccatgttggcctcttcaggcctgctagtcactggaaattgaggtccatgggggaaatcaaggatgctcagtttaaggtacactgtttccatgttatgtttctacacattgctacctcagtgctcctggaaacttagcttttgatgtctccaagtagtccaccttcatttaactctttgaaactgtatcatctttgccaagtaagagtggtggcctatttcagctgctttgacaaaatgactggctcctgacttaacgttctataaatgaatgtgctgaagcaaagtgcccatggtggcggcgaagaagagaaagatgtgttttgttttggactctctgtggtcccttccaatgctgtgggtttccaaccaggggaagggtcccttttgcattgccaagtgccataaccatgagcactactctaccatggttctgcctcctggccaagcaggctggtttgcaagaatgaaatgaatgattctacagctaggacttaaccttgaaatggaaagtcatgcaatcccatttgcaggatctgtctgtgcacatgcctctgtagagagcagcattcccagggaccttggaaacagttggcactgtaaggtgcttgctccccaagacacatcctaaaaggtgttgtaatggtgaaaacgtcttccttctttattgccccttcttatttatgtgaacaactgtttgtctttttttgtatcttttttaaactgtaaagttcaattgtgaaaatgaatatcatgcaaataaattatgcaatttttttttcaaagtaa

SEQ ID NO: 7 - DNA, 281756 bp, Homo sapiens
gttttcacttggtcggaatggggagagtgtgcaagagatcgctgcgggacaggttcctagagatcgctccgggacggtcgtgacggcccccgagggacatgagagaagaggagcggcgctcaggtaagctggattttgcggtcggaattcgcgtagaaacgaaaacttctggaaggggcttagccccgagccccggaggcggacaagctgagcctcctggctgcaccctttggaggctgctggttgcagacgccgtcgtctcccaagggcggctgtcaccgcgtgcgtcggtcagaccaggccgcggtgccctcggcatccccgcgtcccggcggctgtatccggctcctccccacgaccgaggtcccgggcaccgcgcctctccctccggacgctctgcgcgacgtcgtcccagttctcatcagcatcgagggcagtccgcggtcattttataaacgtcttagtgtcgcaaccgttttcacttttactattttcaatgtttgcaacggttttcaatgaggctggaaaaatatcacttctcgctaaaagcgaccccgagttaggaggagcgcgcacccccgcggctccccctcccacactttccctcccctgaccccctctcctcccctctggtccttcccttgctcctcgcccctccagtagtcgcgtgctgggttcctttcctgctggggccggactctctcctccggccgtcccagcctctgctcctccgcctccctcctcctcttcctcctcctccgcctcctcctcttcctcctcctcttcctcccggagccgccagccgcgtcctaaacccgagcagggcgcgtagtgtccaaacctgcccgcgcggcccgcgctcttggccccgagggcgcgcgcacggacacgcgagcacacccacacccacgcgcacacggacacgcgcgcactcgaagactcccgcgcgctcgcacccacgcgcacctggccacgcgcgtgcattcccgcccacgcgtccctgccccgcccccggcgcgcactccgggttcgcaagtcgcgcgtcggggcggccgccctgctccgcgattggcgggagccggagcctccctgaacccggcgcccacaccatgggctgagcccgtcggcgccgagggagttagtgcgacccggctcggcgcgcacggccaaggcacgcgcgctggcacacgcgggcgcggacacgcgcggacacacacgtgcgggacacgccctcccccgacggcggcgctaacctctcggtaagtccagcgccccacgcgacctgcccggctcccacgctggctacagcggctgcggggacggggaggaaggcagcggggtggccctaggggctcactctgcagggctcttccgacggcgccgggacaggtggggcgtccagcgccgggagggacggctcgccagtgcggggtcccagggaggcgcgtgcagtcgggtgcggatggagaggagggggcaccccgaaattgacaagggccaggagagcacaccgcggggacttcatctggggccccgaccaagaggttatttgtccttgtctggagtggaaatcagggttgaactaaaaaagctgacgcttggcctaaagtagggaccaggtttgaggctgggttgtcactgtccgctgggtcctgatggtggaatgacccccgacggcgccttcccgcacaccccgcaacaccggctctgggaccagctctcagcgccaggagcggtccctttcctttcccactctcagtctcagtcttttcacctttccattcttcagcctgcagctgttaagtttatttgcctccagtttaccaccctaattgcaaaacttggcatgttaaaaaaaatatagtctgtattttatcagctagccttacctggtttctgtctgaaatacatcgtccgtttattgctatggtatgttgcatagatgcatagaggcattaattatcttttaagtacaggacaaattctgttattaatagcagactacactgcgcaataaaatggataaacaatttcaatgaggatgtggatttaatacaactcatcgttaatctaaagatagtttcctttatctttcaaaataacatattcgtatgtgctacaggtttcactctgtacatgtctctatagcttttgtagttcagaaaactttcaatgtgagtaaaaatacattttattcttccctgggtgacatacataggacacagagtttatttacctttgggactatttttgactgttttccattctctccaagtagtttagagcccctgaagggagaactgtcacagtcccaaagttaacccttgctccgctggcattggctggtgcccgctcccggggcaggccagagctcatagccttcatccacaggaggatcaggcaacagacgttgcgaagaacccaaccatgtaaattaattcaccatgtgtcaaattattaataagctaattacaccattgaaattataattctagcagaaacggtgagctatgtaaacttgtggctaatatatcaagttttacaattctcaagaaaggctttagaagagctacacacatcacaaatgctatttgccatttggtaatcctagcttcggtttgggtcaatggcttttggaaagtacactgaattagcaaatgggtaatccgtctcaagatatttgttaaggaatatataattccagtagcacttataattccagtttcttctcttttgtaacattttataattacttcattctatttaaaaaaatttagagtagaattgtagtacatgatttcacgtttatctgttatttcatgaggaattattggtgatttaatctttagctaaaatttagaaaattagcatttaccattgaagggattgtgtgaggggctgcattcacacctgtatataaacattcccccctccacgttccacgttttgcttttatattaaagaaaaaccttgttgagtttttaatcttataaaatcagatattttatttgtggtaagacctaagatcccaatggaataccagatacataagtaagaaggaaagcatctctgaaagacgtcagaaggaatgtgtaactcacatactattctacaatgttatacgttatgtatcttttaaatgcatctcacattgtaagtagggtaataggaaactttcaacactttttttttctaaaagtaatattagtttttatttttatcttgctatctttaaacaaaaaagaaataaaagggggaatttatttcttctcaaaacagaagagctaatgtttctggaatcgtttcctattcccaggcaaaaaccgatagcaagtcagtcccggtcataggatctggagtggtgggaagacattgtcatagtgaataaatgtctgatgcctgttatttcatagaactccattgagaaggtgtcgacacagagccacctacgtttctaatgagacttatggagcctgggaagcagtttggtcaaggtggcaaaatcccagctctgtgaggcatcaggtcacttctcagtttaagttgacagctgatctctctgaatgcaggtctctttttgtcacctctttgcttctttaccccttgcgtctgagcagttttccagagagcaggagtatggcaaaggagttcttttttccttccccagtgtgtaaggttacttgggctttcccagggagcatggtccttcacaatacagctattgtttaatgttctacaccttgaatttgaaccttagcagcaacatttgtaagaaaaataggctgatgtaacagggacgttcagatctttggggcacagtttccgatgattatggtacttagtggcagtggtgtgagtagggctttttgaaaactctgaaaatcactgcggtatttggggatgctcatgcttggcagtgaccagccacccctccatattgttgctgttccttgcatgatagcattctccctggtatttcccacactcttattaggggtcagttaattagttgtccattatgcattgtcagtgtacggacctctcacaatgattgattgaaagcagttattttgtaaataaacaacagcgggagttttccaatggcttttccaatggctgggctgtcacccaaaccagttcttcaacatagctaaaaaagttaaaagttaaagttaaaaggggcatctttcccttttaactttatcttttatttaaaacattttcatattagaaagaggcttgaatgcttcatgtttgtaacattgcaaagtctagtgaaggtagtgaaggagggtgagctaaaattactttgctaaatttaagtataagtaaaatgtagacaaaaccaagaaattaaagggtgcatctaaaaatggagcgctggatctaagttttagatttaaactaacttttaagttctcctatttttagggtcgcatgtcataatctgggagaccctgattgcgtatgagaaacagtaattttacaatgaaagtaaggggtttggctatcttgactcagtgcgtgttcaggagaatgtgcaaaggaagtttcattatgtgactctgtcctattcagaatggctatatgagacaatggaaatatccttcaagtatgtaaaataggccatttgaattaatttatcacctctttttttttgttattatcccagagaaatagacatcagatgtgatctgggacaaatctttagtgtgtctaaaggtttttaaaacctagatttgtagttgcttccttttaaagcctaacctatgattttgaattgttttagtgggaatgagatttttgtacctgcttttgtcttatatgtgctcccttttaaggataacattattgcagtaattattacccctgcaaaacatactcgggggggaaaagctgtctctctaggaaataggaaagaaaacaggcatatatagaatgacttttaaaaaataggaaacccttattttcacttgatgtcagcattcagcaaaagttcccacatgttcatttgaaagtgtagaaatgcatttgaacctcagttttgagagtaggggagcaaaggagcgaagccttatttagtgaagtactatcgtcctatttccattaagtgattctctgttattggtagaaagattaattttctctctaactgggtggaaagagtggctatgcattcttggggctcactaaagtacttaaagttggaaagtaaaagaaagactaaattggagcgtgcacatttttctgcacgcctggcagggaggtttgtgtgactatcttaaggaaatattagcttgtgcaccgtcagaagctgcatcctggaatcagattagctggtgttgtgaatctccatctgaactaagatggacagtaagagaatcccaatatcttagtaaatctgttacttacctattgccttagtttaataaattgattgaaattggcaatgggaacgtgctgttccttcttggtctacagatgtgagttcctgaaatccaggcagcccttgatgtctcgatggcccaatgacatgggacaagctctgcagtgtcctttcatgggtcctgtcactggagctttccatctgtaggggctgctgccagctttggagcctgaacctctctgccctccctggaacccccctccagccagaaacccctttgtaatattcctctctttcttccacagacccttgcctgctgctggggcctctgcaggggcagtggtttctcatcacgtgtgggttggcggggggcgcggtgaagagtaggggagggagagagccctggcctctggggaccttaaaactgtatttcatggaaagcctgttttccaaggcaggcagattctgcagtactacctgcaattcctcccatttggcctgttcaccaaataatttgagggggcagagctgggtaccagcctttacttagagctgtgcttctgttgaaaagtggggcccaagtttgtattaactaatctgggaactggatgctgaggtagagtctgttggtcatgttgttgtcccccaaaacttcacttcttaaaaccatgacagtttcatggttacagtgacagtgctgcttacattttaaaaatccacactcaagcctcaataagcctgaagggaatttggcctgattaaatggttctttttagttgttcgtagtcagatgtcacccctcacacacaattaatttgttcggagccaagtgcgttccacacacattgctaaagggtgagaagaggggatagcaggtgaatctcctagcaatcaagctaattatccatttgcaatgtatggtgggagatgctgaatgctagtgcaatgctagcattgcattgtgttcttaaaatgaggactcttgggagaattgggaagcttaggcacaggcaaagcaggaatttcagaaacacgggatacctccctggacccacctctgtgtgcaatgaaggcttggaattctgcttgacatgagagtgaacgggggtctcagggttcagaggaaggactgaaagaagctattatgagggccctgtgggaggaagagggggtgactgtggcactacttaggaaggggaaactttagacctcagcactgaagaaggtgcatttcaggatttttgcatgggaaatgcagagatctaagcagagtataaataataagtgaaggatgtactagcaaaatgaaatgttttgaaacagaaaccactcacatttacaatctcaacataaaactttttaattaaatgtatcagaaagctgagatttcttttattaggaaatgaggtaaaaacattttgaaaagaaaccaagtgctaattgagaaacattctaagatttcatatgttgaatggattctcattaaaattatacccaacctcacaaagctgatgtgagcctgctgccagatttacaaatctgggtctataattgcacaaagtttaaacttgccttgtgcaaggcttgctttttctgcagttcaagatacagcagcaagaggacagaataagcaaaagtggaggaaaaatttgcttcttcagtattgaaaagtactttctagtctatttgaccccgacagtaaaacttacttcactacagagttttaaaatagaaataatgacagtaaaaatcaaatctagggagtcttctggagaagagatgttagatcagcatattattagtatttatcccaaattctgaaaccttacctaaaggccctgccattagaacagagagggatattattgattactacttgaggtatcaaagtaaaaggattttatttatgtatttatttatttagagatggagccttgctctgttgcccaggctggagtgcaatggcacattcttggctcactgcagcctccaccgcctgggtgcaaatgattctcctgcctcagcctcccgagtagctgggattacaggcacctgccaacaggcctgggtaatttttgtagtagagacaggatttcgccacattggccaggctggtctcaaactcctgacctcaggtgatctgcccgcctcgtccttccaaagtgctgggattacaggcgtgagccactgcgcccagccagtaaaaggattttatagatgaaatagtatcagttctgaagatcgaatatctcttaatgaaactgaatatatttttacagttttctaaggcttgtaaatataagtgattagacagaatgtcccacaagggcagtttcttctaagtaccccatagccaaattgtaaaaccaaaggtaagtcaataaaatcatttcataagtatgtgtaacccacagtaagggctgtatttgtttgtacattacgagcacatttgtaaatgcatttagcatcaatataaactttttctttgcaaaattaagcattacattgtattaattgttctttatgggtcttaagcaacgtgaaaatacatttcttaattaaaatatattgagcatctattaaatgagagcactgtcccaaacaagaggtgggagcataagtcatacagggactgttaagacacgggacacgtctagagattagacgaacaactgcaaatttagtgggagaagccagaacattccgctatggagcccgcctatccacctgtctgtctgactgcagcaattagtggcatgcttgaatttttctctcttccatgagttgtgttaacaggtaaacaaaactaccaccctttttactttaaatagctaagtttagctgaagagaggagcatcccctcttgcaaggacactctaaatgcggtgtccttaggataaatacctacaggtggaaattaatacaggacaagtggaatgcctgagaattcagggaatgctgagtaggcagagatcagcgggcagtcagatttgactcaaggtgagaagatacaggactccatccacagagggggtgctccggatcctgggaaaggcacgtgcaaaggaagggaggctagaagctacagactgtgtggtggaaggcaagctgtccatttagtccatgtttttgccttatgttctgtgtaagacttcatgcaagacactatgcagaagacttgcacagtgccttcagggaggcaaaatccagaaagaggatgaatccgcatgctatggaatctagaaagggaggtgagcaagaatgccatggaattggggcagacattcacaccacagagtctagaaaggaggggaacattcacatcgtggaatctagaaagtgggcgaatgtgcatgccgtggaatctagaatctaggcggtgaatgcgaatgccgtgcaatctggaaagtgggtgaacatacttgccatagaatctagaaaaggggtgaatgcttgtgtcatgaaatctagaacgggggtgaatgtgcacatcatgaaatctcgaaggagatgagttcacacaccaacaagagtggcatcctcagtgggaccacctggttgaactgggccagcatggcagtgaacagggctctagactgtatggcaatggaggagatgttcccgagcagggagacagcctcgtgcaatacactgggtttgctgtagggccgttcttgggcatgcttgctatcacacaggtccttctttcttatggaatcattggaggatttcatttttagccttagcatcaggagtcattgtctgagcatttggttggatttcattatttggagacgtgtgaatgacccaactccagcagatatgtgagaccctgaggcctgcctggcgggccattgcattcctagctcgagtttatgttcttacccttgtttctctttagcttcatctttattttttattttgcttctgaattttaaacaaccttgtcatattgcatatatccttgtagaccactttgagtccctttttgggaacaaggtagagtataaataacataaaatagaatcatgcaatccaaaagcaatctacaccattccataggaagatcagaggatcagagcatgctacccggaggctgaggcccttgagctgtgccatggcgtgttggatctggattggcgggaatggtagagatagcagtgggcgggagggtggaggagtcaggcctgctggtgtgtttggagggtggaagtgttacctgggagtgggtcacacagtgtggaaactgaccaaatcctctggagtgttggagggatcagaccagacacctacttcaatatctcaggtgtaaagttaagaggtagggaagaaagcagtcttacataagggaagggagaggtgtgatgttgtggaaggtggcaggtgacattcactcaccagatggtatagccacaggagacactttgccaggactgtcttcactgtggctctttgcaggaggtgctctaattgtcctcattttccagaatagcagtgaggctcaggagtgctgagcaccttgcctggagtcacacagtagtgggaaccagggcagcatcagaaccaggcaggcggatgctgagatccacccatgggactctgctgtgtgtagttatcttggtcagagtggcgggcctgttatggaagtgaccggaagggagcgagtgacgtggaggcagagtccgtgtaaggtcctggcagtgctgggcaaaggaaatagaacatgaacttcaagggtagttttaaatcttccagtagccaaattaaaaaagacagggacaggtggaattaattttaataatgtaatttatgtaacacatgctgaaaatactaccatttcaaatgtaatcagtgtaaaatatggatgagatatttgactttattttttttctatatgaaatcttcaaaatccattgtgtagtgtatatttacagcacgtctccatctgggctggtcacatttcaagggctccatagtcacatgtggctagtggccaccatgccgaatagtgcaggtctagaatgtttagcttaggaattcaaatttaatataatgagcaaccgcaacatctattatgtctcttggccacaggagtagaagttttgtgaccttatgtcactaaggaaccagatatgatagcaatagaaaattgaatgccagcgtgacatgttcggtactagatctgcagtttttacattggagggaaaaatgtatgtataatttcctgttgagtcacttcatgcttttaaagggtaaaataaaatactgaatttcaggccaaaactctgtgtgccagctaacaaatagtgcggcttttgccggaatcatgctgcgacaactccaggcataaaaatgctatttgaatatcctctatttaaagataattccagcttgatgacaaatttcttattttgcatgtttcttgagaataatacaattgattattttgaagaacggcattcttaaagtgctagaatcccagaggaagaaagcacatcaactaaatgtattgctatagaattaacctttacaaggacatattcacactatttgatcatgacaggttgcacataacacaggcttttcccttcgtttgtgatactgaagcttatggaaaagtcttctgaagtcaatccacagtgcttacatgccatttgttattatcagtgtgctatatgtgtactatacgtgatgcgtcattgagtaaccttctacccttttaactatgccactcttttttttttaatttttatttcttgagacagagtcttgctctgttgcgcaggctggagtgcagtggtgcgatcttggctcactgcaacgtccgcctcctgggttcaagcgattcttgtgcttcagcctcctgagtagcagggactacaggtgcacaccaccatacccggctaattttttgtattgttagtagagacagggtttcgccatgttgcccaggctggtctggaactcatgagttcaggcagtcctcctgcctcagcctcccaaagtgttgggattacaggctgagccaccgtgcccagcctatgctactcttaaagttaagatttcatttaattttttgtgcaaagtaagaaacttcactagcagattcttactcattcacattttcctgaataagaaatttgtttttagttccagtagctggtctctaggcaaatttctcgtctgtggttctttgtagataagtttgttttcattatcgctagtgcataataagggaatttcactctttttattttggtttatttttcccagtgggcagtgcttactgtaaaaataaaacaaaaactgctaaataaaataagtgtggcttctctagactctaatcaccatattgaattttacacctaaggcagcacaattattggtaaccaaacagtgaaggagaaggaatattgtggtttattaaaacacccaaccatacccaaaacctctgaccaaggagcatgactgtgtgttctcgcgtctagcattatacgtctctggtgtgtagcgatgcttcattgtagggtcacgtaaggacaaatggagaagcaagactttatcttgtgtactgcaggctccccagctttcaaacgtaggcaatgagttggattttgtagttgaatcttgtttcgtcctataaggaacgtgggccactaggtgtgagccctttaggggtaactgaaattctattccaaggcctcctgcatgtccacttgatgccgtaagctgcattcaagcattgcagtttcgtatcagagtacaaatttaatttaaagtctaaattatatttgagcagtctgaagcacattaaggcttcttaaataattcacttgaggttacgttcagtgaacatgtgtaaatatgagaacgtgcgaggcaagtggtctaaacacacaatgaatacgagaccacattgatgtaagccacaagtgcttaaaatcttgtcggaaaaagcgtgtcatccccggtaaccagaacgtttgactggccatgtggctcgcagggaagggttggtgtccaggtgcctctgtgcttggtccttgcagtttgccacatcatcaagggagacctttgagagaaacgctacgtcatcagctcatgggtgtggctctcagctgcagcgccacaggggagacagaagccccctgggtgctgcctgccgcagccctcggtgatgccaaaacagccgtttcccatcagcttctcaggttgggtatctgcgggtgcgaaatggctgaaatgtactcttggaaactgttgtgtttagttaaacttggattaatgagaaccatcgagtttattttttcctttgggctgaacagttttcatatgttatagagatgtgtgggtggattcaggggcatgacaagtgactcccagtagagtcagctcatgaaggcatctaagcatcgctgagcaatgccccttcctcactgtctctgagcttctagaccttcctcctgggcacgtccttccttaagtgtttggactcacagttctgaagtgtcgtcgttagtgaggtttctcctgcagtcaacacacccagggactaaaagaaacaagccagcgagtccaatgaaatcaggctgcagatctgaagtgcttttggaatatcctgcccctgctttctgtcctctgtctggttttcatggaaatttgtgtctgggaatgagggggaatcggagtggatttgctggaggcaggtgcctgtgttctttggcccttgccattaggagtcaggaccaaggaacctcggaggaggtggaggaggaggcagaggccgtgggagatgcgatgagcacggtgcaatctttataagacagtagggatttccacagacttcctgatttttgaaaattattcataagcctgccctcatctgggattttcaggacagaaaacataccccatttactgtccacgctccataaattaccctttcagattgttgcaaagttattttttgcattctgtaatgctggcatacgtaagctctgtgattgtgagtaaaatgcctccatttctttctccagcaaggatcaggacggcactggtcaggacaacatgcggtagcatcgcggccccatttgaaatacaggctacttctccaaaaggttgggaataaatgctggcccaaccctgatttaaaaagattaaggaagaaatggaaatgaggatcagaattagttacgtttgcactggcaaaggaagcgagattaaatacttgctttcagtctttgctccaagcaagtaaaaaatttaaaaaaaagaattgcatattacatatttgggaaagttaaatgcatgcttcctttctggaatgcacaagcctatttgtaatgggctttgcaaggcaaagattgctgcattggacacttaacatgaaataagatgtcctgagaaatctttagttcatagacattaaaaaataagttgctgttttaaataaacataatcatctgcttcatctgtgtcagagtgccgagtctttatttctttcctttttattttttgctttttcagtggttttatttcttgtgctttaatacccattggcttctaaaataggaggtgacgtgtatgtgacttgttaaagagtgaatgagtgtaacataaccctttcaattcccaacttagagaaatcattttggggataccttaagcatatcagaataaaagaaaacttagtatttctgtgtcacctgaggcactggtgccaaaaccagcaagaagtagtgacattttgtaatgtagttacatttaggcttaaattagtgtttttcaaccttttttttcatgaccaacctcctgttttcatgatcaacctcctaaaaagcattttctgattttttttcctaattgtccctcctcacatgaaaatttaataccacagatatactgttttagtactttgcattatacatatacgtatgtctacatttaggtatatctgtgctttatacagaaaaggaataagacgtttttcatccttcaagaactaattttagcctccttgaggatgcatggcttaaatacgaaatgccaatacttgactttgcaaagtattctgtttaggaaaaaagacggtggatgcccgtacgtgaccttagaaaggactgaaggtggtgaggagattcaaagtaagcaaggactgggacaccagggaatgatgttctgttggttgtcgtccttgtttagaacgtggcctgaaaactgataatgagaaaacaaaagatggatgacagctcccctttgtattgttcaagcaccattaaacatgccgaatcgctgaccacatgttttccacgtatgagaaggtgacacggtacttatcaaagttatgagtggacaaaagcagaaggttgcaaaaaccagtagcctagagagagcaaggcggcatggaggctggcagccaccggtgagctgatgggagaggctgcctttatgaacttctggacctgagcacgcagccttttccctgcacgctttggatgtaacagtgcaggtcatgtggcgggactgacgtgcagcagctggatcacattgactctgatctttcccctccagtaaaaatggaaatgtaataaaacaaacaacaacaacaaagatgctgagcttaccccaaaactcaatcagaagagaaaaacacctgggccattgtcaagagaaacaaaactgggccggtatgaacatgatcagcgaatagtatttccattaaaaggcaactgactcagagatggagggtgagtgttctgtgaggcagagctgaataacccacccacgccctgtagctgacaggatcacttaagcagagttactagaaatgacccagtgatactgaaaacaggaaaaagtacatgaagggaaaagcagattcttaggaagggaaagaagtgtgtgaaaccagagcagatcggtcagaatctaacattctgtttgagtctctcctcatcacctgcagtcctaacaaatcctccacttctcatcttcaagtgagtaatggtatggcaatgccctgtcttctaggagagattaaatggtaaaggatgttaccatgagtgcagaagcgactgttttgtttttgtttgttttgcttttttttttttttttttagacagagactccctctgtcacccaggctggagtgcagtggtgccatctttgctcactgcagcctccatcttccgggttcaagcaattcttgtgccgcagtctcccaagtaggtgggattacaggtgcatttcaccatacccagctgattttttaatatttttagtagagacagggtttcgtcctgttggctaggctggtctcgaactcctgacctcaagtgatccgccctccttggcctctcagagtgttgggattacaggcgtgagccaccacacccagtcaagactaggtttctaagagaatggttgcatccaactcagaatgtgggaagtgtggtgatgctttgtgctggtcgacgtcttcctgggccatcactagagtatatgcttctatctgggggctgagatcagagtggtacctgcattaaacatcaacaagtcggctatacagagcccagctgtgccttttgcttattgctttctgggcctgtatttggaatgtaaaagggacatacattttcactgatgctttttgtctttgttgtctatgttttaagtggtgtttaaattcaagcaaatactgtttagttgtaaaagctcactctttctcaagtctttcctcccttctgtttttccaaattgtctcttttgaatcatcttacagatagagttagtttgagtcagtggtgatccacacattgaatttggagcccaagccgcagaactgaccaagtgcttgtcatggtcacgtggaacccagatctgaagtctgtgaattcttgcccttaaaaatcactaaaaatacctctttgaaatatgactcgtttcacagtggattccacagtagcaaaatcacattgtggtttatttggtagcagggtcagatgagatgatacattgcaatgtatgcctacactcttatgtatatgaaacctatttatattacaagccatatatttgtttctctatagccatagttcacacttaggtttttcttgccttttctgggtaattccctttgagcttagtaattggggccgttaactgtacaacagtgtaggaatttattatttacttatttttaagggtttaaaatttttaaaatcgtttatttttttctgagacagagtctcattctgtcactgaggctggagtgtagtggtgtgaccacagctcactgcagcctccatctcccacactcaaatgatcctcccacatcagcctcccaagtagctgggactacaagtgcatgctgccatgcccggctaagttttaaaatatttttgtagagatggggtctcgctgtgttgcccaggctgctctctaactcctgggctcaagagatgctccctccttggcccctcaaaatgctaggattacaggcatcagctgcccagtgtaggattctagaaacattaatgatccttaccacctggggtcaatgatggcatgaagatcacatctgtattcagaaaaagtgaatatcaaatacatgttatttctaggccatttcagagttgtttcactgcttggctcaattttaatatgatttttgtatggcaattttttcccccaaaatatttaattgatataatcctgataaataatcttgtaaatattgtgataaccttgtcttaatagaattcagcctaagttagttcttccttggactacattgaaaggaatccagggaagacccctgtcataccaaatttcaccctttgctaattctctaggtagaaaaagactgtgttatacgttgatctccttataaggtgtttctacagaccaagatgtctgcaggcaatgtttgggaaggctcttgtttgctaagaaatcacacccaaatggaaaccttcagaaaacaagtggaagccaggaaaagtgtccatcactggaaagttgaaatctcctttaagaaaatcaatttattaaaaggaaaatgtcttcccatcttgttatagtatgttataatatatcgaaagttcttttaaaagggattcttctacttagtaacaatatcatcatggtggtttgcagacagaatgtcatgctactaaatggtgccgcctcttccattggatttcagaagccagtggctgccctgctctgcacttcttcctcttcctggcttgacctcaattcagacctgtgtgtccttctgcacagtaggtcccaggctaccacctggagaggggaaaaagtggctatgaaggcctctaggaaaaaaagccaactccactaaagtttgttgagagggtgagaaagaaaggaggggagagggtgagcagaggggactgtcccttgggaccccagcttcccaagttctggcagtggatggtgtctgtgggcacttggttttcagttactcactgcctggacagtgtgtgttcttcctgccccacgtggccagccaacatatggctcaagcccacagttcttattttcctgtgtttacttgaaatctctctgagcacgtggaatttacagaaacatgcacttcaattatcctttacattgacccaaaatggtactgaggaaattttccagtggccctgctaaccctgaaaatggcaacagacaggtgcagaccgatgcattcccggtggggcggaatcctctttgcagcttgtgagtgttgcccctgtggtttggaaatacaggggaggactgaattgaatgagttcttttgttttgcggaacacctgagtttgtgtgtgtagcttgaagacccattctaccacaagaaacaaatttgcctcttaaataaaaggaacaggaaatagcatgttgttggctttggtgtgcatcaaggttgggagaaggaggagttgtgaccttactctgtcccctgcagcctcgggcctgtgtgtcctatgagcgagtgtcatggggtgcacgtgggctcactggctgtgtccagatagacgtttttgttcccctgcttcaggttttagtcctgagactaccaattaaaccatcccgtaaatcttccattataggtagtaaaacctaattttggatttcctgcgtgctctggtatcctgcctgattgctaccaggctggacctgtgaagcagacagtacgtgtattgtgccacgtgggaaagcccttttcttacatattcgggatttagtcttaattccctgactgctttcatcttaagttttaaaactcctgaggatagctatctggaactctgcagttgacttaattcttttcagtggatcactttgatgcaatgagtaagggaagggggcgctaagaaaagagtaggcataaaagtgggtgaagtaaaacaccaaagccactgtagctctgccattcttgctgcgaaggcacagggtgtgccctctctcagtgtttcatactccatcatctgtaactcagcactttcctcaagctggggagtaacagctgcttgggaaaacacatacatattttggaagtatttgaatcaatgccttgtttctacccctctcctccttcagtgacccaatacctttgaccaatgatgctgaatggtttacctgggctggaatctgggggatcaggagtggtgctggtgacttggtctttgtccccctcatcccttgcacatttgtgaaggtgaacttggaagatcagtgggtgtaacagtgttgcaaggatgttctgagtttgaggcagccagactttgttacctattaatacaaaggaaagatgaaacctatgcaaaagttgttcttcacgctggagacttggcaggatgtagtgtgctctgagaatctgcaggtgagagtttgagtgggtctgtgtatatggatttagggtggggtgtgaggtgaaatctatatgaacagtactaaaatgtttaaaacttacaagtgatatataacagcatttttgaactttagaagatggtgtcaataatactttgtttaccgtgagcatacagatgaacaaaagtatttaaattaaatctttctgcactcagacataatggctattgaaaagtaatgcatttcattccagatagtggaatttctctcttatacacatgtttttccccaaaggggatcatattatatatacacttttatatatatgtgctggcacctgttttgttcacttaccagcacattagaagtatctgcccatgttcataggtatgcttaatgatatttttaatgccacattacttttaaactgtctagtattccatcgtatgtctctgtcattataaatttatctacctagtcctcttctgttgagtattcaggctgtttctagttttctatattataaaccaggaattcccaatcttgagtgcagaatgcagatgcccaggtcctatcccaggccaattgaatcaggctgtcttggggtggggcccaggaatcagtattctcacatgcctccaagatgaaaattactgtttcaaaccatgctgtagtttatcagactgagatacgctcttgaaagtggaattgtgtgatgaaagatatgtatctttaatcttttgatatagactgacaaattacctttcagaaatttgttttttttttcacactaattttcactttaagctttaaggcttttaaaaggtaaataatgaaaaaatttgcatgtgcatttggaagaggtttatgtcatactaaataattatgttgatctgtttgacattgcttagtttattttgtattataacatgactgtgttactaacataacaaagggggacgtatttggtgcctctttccggttgctttagtgagactgtggtgggaaggggcagatgcaacagccctgatgatgagtgtcttggttcattcaggctgctataacaaaatactgtacactggatggtcataaacaagactttatttcacatagttctggaggctgggaagttcaatgtcaaggcactggcaggtttgttgtctgttgagggcccattttctggttcatagatggcatcttcttgctgtgtcctcaaatggtagaaggggtgaagggagctctctctggtcccttttataagggcattgatcccattcatgaagggtccatcctcaacacctaatcacctcccaaaggccccccagctcctaatgccattaccttgagggttaggatttcaacatgtgaattttgggaggaagcaaactggtggtacatgcaatgagcatgggatggctctgaagaactggattttatgccttttctgggttcacaactgactctcagaaaacggttgcctatctatgtatgcgttagtttattcactgtgaaattttctacatgttttatcactgttctattctagttgttatatttctcatgctaatacatagttgtaaaagtcaaatagtatttctgcgcttataatgaaaaatagcagttctctgccttccattttcccagagagccccctttcctagaggtaactgctgtcctcttagctgtttcttctgtcatttacctccttgttgatacatcactgcgttttcatgagcttttcatttggactttgtattagtccattttcacaccgctgataaagatgtacctgagactgggtagtttataaagaaaaagaggcttagtggactcacagttccacgtggctggggaggcctcacaatcatggcagaaggtgaaaggcacatcttacatggcggcaggcaagacagatcagagccaagtgaaaggggtttcccctcataaaaccatcagatcttgtgagacttattcactgccacaagaacagtgtgggagacaccaccccatgactcaatcatctcccaccggctccctcccacaacacgttgaagttacgggagctacaatttaagatgagatttgggtggagacacaggcaaaccatatcagacattatcaattttctcctaaggtagatgagaatttagctcatgcccccttcccccatctcctgtttctccatccttccaatgtaggtaaatcataatgttggttaagttgatatgcatttgtaacattattataactatgtaaatgttacttagaactgagtcatatagtgtgctgtaatgttcgattttttcaaaaacaataacttttcattgattttcaattgatttttcattgattttcaatgattttcaattgatttttcattgattttcaatgatttttttattgccttggtttttctaagtacttacaataagactcccttaaactccttggcagaaccagttcctcttttcagtgtgttagaatgaatttggtcatctctcagggtttttattgttttgttgtgggggagggtgctttaaggagccctgtgctcacagatggaaccggctgtttccaggcgtggctgtcctggcatctctgccctctggcaccctaggattctgttggttttcatgctgggtcccctgtctccaggttatcctgtcagcctcatggttggtgtagttcttcacattgatggcttggctgggcctttgattccctttaagaaacatttccctcacgatttggaaagtgaaagtgatgcttcatagactaccagctcttattgttgttatcaagaagcttgggatgccatcctggttcccatttctcttctctgaatgttttaggtttttctctttcatctcagtgtcctgaaatgtcacagagatgtgccttgtttagggtcttcttccttttattatgtggggtactcagtgggcctcttcagttgtgggaaatttttctgtatgatttctttgagaattttctcttccatttttaaatgttttctcttcttggaactcttgttatttagatgttgaacctcctctctgatcctttttattcaaggcatctttaactgtttttttaatggctgtattatttgttcttatctttaggatcttaatgatagtttttttttttaaagttaaaacatctctttttgctccacattttttcttcgtgattgttagattttggtcatcatttctaatgcttggaagtttttcacaagtgtctggtggaccttggatgctcttcactaggaaataattcagaataattcactaggaaactgtgtgcccaggtggggcttgttggctgggggtgtgtgccgtgatgggtatcagcacctgactatgtcattggggacccataagtgactgtctaagtagctctttctcttgggttggtcagcatctcctgggggagaatactgctgttgtcagctgtggaaagggtggtggaatgagggtggggttgttagagcctggctgcagggttctgagggtgaagtagagggaagatcctgggggaggtaccttgccattcacttggtcccccttttcagtatgttgcctcattccctcactctgcagagcctggagtccctgatttctctctggagaggaaccctaaattacctgctaggcacaggatggttacctggctgcaggggatcagaaaggggatgtgggaggaggagggagcacttgaatttcccctttctccaacactcatacactctcatgttttcagccccattccttgccctgctcccaccctctgagtgacctcaaatttccaaagctctcagggtcgtatgttgcaaattgcctttccctttactgactccccccatcctctggcagggaggtcccctcactcatcaactgccattctcttatttgctttccatcttccaaattttgcaaacatcttccacaggctgttgtctcttctttcttccctttgtccatttgaatttctacttttagtgatattattctagaggtaagcccacaagttcaatctgcccttttttacctggacctgttacattttagagatgaagtgagttgcaagtcttgttggatgagtgctgcattctaccacggggtgcagtagttgtaagtgaggagggccagatgcacgcaaagtgataagatgatcatgatgaagctcacgcttatagaatgccgactgtgctgggctttacctggattaactccccaaatcctcacaacaacccactgggaggggctctgttattcccaactcacagagcaggaacctgaggcatggaatcatggagtgacttgctcaaggtcccatggggacaagtggctgagctggacattgcacccggactggcgcacccagatcggaggagtttcacaaaccaggcccccctaccagatcttcccctcagcatttcgagttgcatgtgctgtgtttcacaccttaccttagatcttcgttttctctgatatgcccaatgcattgtgctcataggtttggctgtgatgagaactctcttgctcttcaatccactcagttaacatttgtgtagtcctggatttcttacttttattatctagaccccagcataaacttctaatgggcaagtgggaacccctgttggaacacacacttgcatacatacacatgtgtacacacacacacacacacacgcagaaaaagaacttgtgaagagacagcataaaactaacagataagaaaaagacatggatcacaagactaaggacaaagcaagtgaacaggctaccacagacagttgatattacagtaagttaaaaacgaggaaattattttaaagtcttttattattattaacagtattgatgattaaaattataattaataacattaacataattttagttgctctttcttaggatcctgtagacagtagcacagttgtcaggacaatcttgcatgatggacatttttatcctcattttatgttgaggaaatggaagctcagaaatgttaggtaactttccaaggacacacaattagtagtacagtgtctaattccaacgtgatcactcatttcaccacaatagcttccaaaatattgagcccaagtaagtagaaagactattttgaacacccagattagtaagaaatccactggattgtttcttaagctctgaatcaaggagtttttattcagtcaggttccgtttgccaattcgcaggtgggtcattttctctggcaagtttcaacagaaaggctggcagaaacacaaaatgacacacatatgggatgcacacacacacacacatttcaggagactgaagtctgggaaagcaatggttttgagatgctttttacactgactagaaagcaaagagaggctagtggctgagcagaaggatgctgtccagatcttcatctagactagattatcaccagccagaccagcgtgcggttccaagcctgcctcccactgggcagcatttccacaacatctttcccctccttggggctttatttccatccccatttaaagtctcccatttgttaagaatccatggttcatgtttgtaaactgtaacagtgttcgcctcttcctttttgacagtttgttgtattacctaataaatatttttgaataaacatttgcttccttctaagcagggggacagccaggcagtgtccagccctctattagagtacagggccccggaatccaggttgagagagttctttttcctgtcaggctgtgggccgcagggttgggaacggagctttttgggtgacatcctgcagagctgctgcagccagcccaggtgggagaggagaggttggatgggtttccaggggccagagtacattcttcctgataatctccttagaaatgagaaaaagcttccctccggcttttatagttccagctttcatctgctcttcacccacaggtgcttcattccttggcttgagtaaataccttcagggaaaaggaaccagatgccactatttttaaagctgaggaattctttgttcaaataaaattttgcataaaagcccaataagtagcccttcccccagagggtgaactcttttggtgggagccggaccctccttgccctcctgctcctcctagcttctcttctcctggagacgggtgtgaaaactgctagctgacctcttctgtgcatttattgtgtattagttcattcttaggctcctataagtacataactgagaatgggtaatttatgaaggaaagacgtttaattgactcacagttccaacatggctggggaggcctcaggaaactttcaatcatggcagaaggggaagcaaacatgtccttcttcacatggcagcaggaaggagaaatgctgatcaatagggggaaaagccccagataaaatcattagatctcatgagaactcactcactatcttgagaacagcaagagggtaccacccccatgattcagttacctgccctggtccctcccatgacacatggagattatgggaactacaattcaatatgagatttggatggggacacagccaaaccatatcatcttgtatgggaaaatagagacctagaagaatcacctcccccaaattgtggaactagtgattgcaagagctgggaccctagcccaaggcctcatttcctgaatattattcaacctgagtcatgctagggtcagctatgtttggacataggtggtaatagtggcggactgctgccaccatgacctcaaatgtcaatggcccagctctcaactctgcagtcaaccttacctaaacacagaaaaggttattgcaaagttatatgccttccagattgtattttatgctcaataattgtgctttaaaaatatcacattgaatccttttgtaacagtttttggattttagaaatgagaagtttattattattatgcttatttctttgtttccttaaaggaatcatgcctgtgaagtttcctcttggttactttttcatttatcgaattactcactatttctttatttatgcatatatctggtgttttttggtatctcagagtagtttgattgtttttgctttttagtgtgttatatttgttacaattgataaatctaggttggcacatcattatcacctaaagtctatagtttacattagggcctgctcttggtgttgtatgttttatgggttttgacaaatgtgagcctactattacagtaggctatactattatagtaggctcacatttttcagaaaggattcagtatgggtctatgttaaaaacagatcctactatgatagtaccatatggaaaagtttcactgccctaaaaatgccccgggctctccctattcatccttctcttcctcctcactaacccatagaaaccactgatctttttactgtctccttttctagaatatcatgtagttggagtcatatagtatgtaggcttttcatattgacttttcccttagcaatatgcactcaggattcctccgtgttttttcgtggtttggcggctcatttcctttcattgctaaataatattccattgtcttgatgtgccacactttgtttatccattcacctatataaggaaccttggttgcttccaagttttagcagttatcttcatgttcttttcaaagcttcagtgaaaccctgtaggcaaggattctacagtataccttccaggtgacatgctgtgccattgtaatcattattgagattctaaaaatggatcatcaatctgcatccatgcaaagggagctgactatttttaatagaataagtgttacagattcattataggtctgtgttaaaaacaatggaatattgggtcttcgtgcaggcaacatggaagtcagtagtgaagattttcttagcattctgtcctgaagtcaccctgagaatacagatgttctctccacttgatgtgccttaaaactggactcgaagagtttttggttggaggagaggttgattgttatctacaccagatatttggggtctagttagaagtttcttcttggcattcttaatgctcacattttctcctcctgcatattcccagggacagggaacttactccctcataaaatagccattcccgttatgcacagctgtgtttgtgagcgtgaactttctcatatcgacctcaaatatgcctccatcatcgtatctacttttccctcctcgaataacacagtgaagtggcgacttttgctcataatggggactaggaacacctagaatggtacctagaaatcttacagtgaatagtggctgaataatttcagaactgaataaatgaatgaatatttgacttatcttcatttatttcaaagcagtatttccttaaacttctcttttgcagataaaatacaactacttattttaacctgatttcctacaatatgtattttagagttatcatattggttttatttttgtggacgtattattttttatcaatgttcttcttagagaattatatacagaacaggccctaggaaatctgagaccattatattttgtgatctgaaccttatggttcttttgaggcagcagctttagggcagcccatcacactgcctttggaaacaacctgatttttttttttttcatatcaactgctgccaatctacatccctctcattcagtaaaaagaaggacctttaaaacccaaaacaaatgaaataattcggcacttcaaattgtatcttatgaaattgaaggagatgcagatgatggttttctcagacatttattttctactttttattttcatcctggtaaggaataattaaaaaatagatgtgtaaagcttctaaaacaggcctcagaaaacacagaaaattgagaaggcaaaaataaataagaaaacaaaactccatacaaacaaataaaaaggcacccaaccaaacataaaataattcatgtgtgctgatatagcatggagcagggtatgtgaattcgttgataacgatgacatttgagaaatgctcgctcgtgccatccagtgttgtatgctttacacacatgaactgatataatccatacaaaagctctatgaagaatcactttttaaatgattttttttctattatggtaaaaagaaatgcataacatgaaagttaccatcttaatcatatttaagtgtagagttcagtagtgttaagtattttcacattgttctgaaacaaaactgaagaaattttccatcttgcaaatctgaaactctacactcagcaaacaataactcccctctccctactttctccagcctgtggtaacccattctattttctgtttccatgaatttcactcccttagatacattatataactagaatcataccatatttatcttttttttgtggctggcttatttcttagcttaatgtcctcaaggttcattcatgttgtaacatgggacaggactttcttactttttaaggctgaataatattccatggtatgtatattctaaatttcatttattcatccatccatggacatttgggttgcttctacttcttggctattgtgattagtccttccaagaatgtgggtatgcaaatatctatctcagttagtttggatatatggacacggaagtgggatttctggaccacacagcatttctggttttaatttttgaggaccctccatactgttttccagaggggctacaccattttacaatcccactgtattagtctgtttttatgctgccaataaagacatactcaagactgggtaatttataaaggaaagaggtttaattgactcatggttccacatggctggggaggcctcacaatcatggtggaaggcaaaggaggaggaaagtcacatcttacatggcagcaggcgagagagagagagcatgtgcaggggaactcccctttataaaactatcaaatctcgtgagacttattcactatcacgagaacaacacaggaaagacctgctctcatgattcaattacctcccactgggtccctccacaacacgtggggattattacaattcaaggtgagacttgggtggagacacagatccaaaccctatcacccatcaacagtgcataagggttctacctcctctacatcctgaccaacacttgtttttaatttttaaaaaattatagtgttcatcctaatgggtgtgaggtgacatctctttgtgttttcaatctgcatttttctgatgattagtgacattgagcatcttttcatatgcttgtagaccatttttttaatgaggatgcacttttactgtgcccattttatagataagaatgtagaggcaaagaaaggttagtcagcttatccaaagttatattcaggcgaagtgatggaatcagaatttgcatctggatggttggctacagagtcctgctttgcaatcactatgttatacccttcttaggggagccatgttacaagatgggaggatgtcctcagatgccgttccttcaagatgggtaataaatattaaatataagggaaggtttcaagtgctttagaccttgagcaacgactttctggaatgatgatgttaatggagtgatgattcaagcagaagccagttaaactgggtttccaaagtcaagcacaccctctagaactgtctgtgggattcggtttgcaggtctcagggctgacgtgcttcctgacttgagccacaaacctggcaggagagaggagatgccaggagggttgagctgggatgagggtcacggctaccaagaggtcaggataggggtgtgggaactttttgcctttatgcatagattgctgccaaaatgaggggtgaaaacggtacggaaatcaggtgtgcacacagtaatgcagagatgttctagtgttacagaggattacatggattttatccaaaggaaaggaaagtagtaaaagggaggtcaaaattgggaccacgccatcccttaaaggacgggaaggctataaaaatcttcccaggctgttagttatttcatctctgctgaaaatgacatatatagcagcaacagaatgttcagttaccactaaaagcaaaatttcccccaatgtgctttaaagagacgagacgtgtgggcgtttagtgttactgattcttcctgattcctttttttttcaaccaaattttctgtgactcatagaactcctattctctctcttaaccatgtgagtatgtgaaaccatgtacttggcccgcaacatttttaaccaagacaaccttaatgggaaatgaagtgtggggaatggtgtgttctgaaggtgccaaatcttttttctcaagggcaagatgcagtccgagttgaaggaattggaagagggtgtgtggtcaactccccggaaaaagcaaatatttgttacccacctgaaacattaggaatgagccagtggtcacatcctggtttctgccaaggctgaatgcagcccagattgtcagagctttatgctttccattccaggggtttcaaattctacaaaatgcataggatgaggcattaagaaagtgaccctttatcttcatttttgttcttcttcatttattttttctttgtagtgcttctcagtttagctctacttcttcctgagggtatatggtgaataactatgtagctcacatccctatgaggtctgaattcctcttatgttgcaaagtgagcttaacaaagaagaaagtcctcagaaccatttcttaaagcttcttctttttgactgtgatcctaggaaaacataaaggtgtgcagtcctgtgctaaaaaacatttgcactcaaggtgattttcaacttatgcaggattggttgttgttttcagtacttgtttgtctcttcttcctcaatgttagctgaaaagatgggtgcccagaacaaagtcaacattgcccagcttcccttgaagccatgtgcaactatgtgaccaagttctgaccaatagaatggaaggactgtgtgccacttccagaaagtatccctcaagggaaggttgaacttccaggtagaggagtgcccttgtccttcctcctcccacctccctgttgcatggctgagatgatgactggagttggagcagccatgttggatcataaagaggaagccctgtgttgaggtggctgaatggatggaacctgggtccctgataatcataccaggcctatctgcttgttttcctatggtttaagccaccattattaacaagaaatctactgtggtaaaacatacataatataaattttatcatttatctatttttaagaatataattcaggggtatcgagcacatttgcaatattgtacaagcatcaccacatcatttccagaactttaaaaatcatcatcccccaaaaaactctttacctgttgaacactaattcccccttccccctttccatagcccctggtaacctggattctcctttctgtccctgtgaacttacctaatctaggtagctcatgtaagtggagtcatatgatatttgttcttttgtgactgacttacttcactttgcataatgttttcaagggccatccattttgtaacatggattataatttcatttcttttttaaggctgagtaatatgcccgtgtatgtatagactacattttgtttacctgttcatctgttgatcatgaataggttgtttccacattttgtttattgtgattaatactgttatgaacattgatgtacaagtatctgtgtgaattcctgcttttgattcttttgtgtatatacccagaagtataattgctggatcacatggtaattctatatttaatcttttaagaactgtcatactgttttccacagcagctgtactatttcatgctcccaccagcatggaacaagggttccaatttctccatatcctcaacaacacttgatatattttttttctactggccatcctcatgagtgtgaagtggtatctcattgatgttgagtatttttctatgtgctcattggccatagaatggtctttggagaaatgtctgttcatgtcctttgcccatttttgagttgggttgtttgtttttaagccaccattgtttttaaaaaatcaatgttatcttctgtcacttgcaactaaaatggattttaactaatacactgccctgctgctttggttgtgatgagaatccattgagtgtggaaaggtttgcacctttcatagagacctagtgtatcaatgctggaagccacttaaaattgcctctggtttaggagcagagagaatgggcaatctgccttagtttacttccctggagaaagaaccagggatggaggagcttatgtctcctggcctctcatccaggtgtttccatctcactgcctcccacaggggaactctgcaagcaggcagctgggagcctgtgttcccttgtccaggggctgcaggactctgtaaatagtacagtctgtgcaggaaactctgctattgaattgtaaatgttattgcctaaaacaggtcatctcttggctttaacagtactagtatactgataacggcaccaatgataatgataatttgtttagaaaggtttggaggaaagggttactggggaggccctagtcctctaaagctgtgtactgctgctttatctcttgacaaaagagaaaaaagttttaatgcagatctcatgaacagggatggtttaatgagaaatggtgtgaagatttagtctgtttgttgcccaccacaaactcagccttgttgactctggagcacgaaaggtgtgattctgagagcttgtagcttctggagggaagggacagggaagttccatgagagaagtgggggcatgagagtgcaggtgtggtatgctcactgtggggagggagccaccaggttccagacagcaggtctctgttgtgcttcacagtttcccccaggagggggactgcagccagctctctcttttctccacgcagtagctgtgggtgtgcaggtggctattgagcagggacattttgtgttttagatcgacccctccctcggtccttagatcatcatgtctttcattgatgtgttagtcattctgggtagtgtatggagcccatcagtcattaatgctcatgtggtcccttagatgggcaaagctcttgacaatgttttttaaatggttgaacttgtgtgacccttttatgactctgtggtctttgtttctaatgacataggcagcattcagggtagaaaaacaactataaatacagagaagcaaaagaaagaaaaagcaggctgtgtatggtggctcacacctctgattccagcactctgagaggctgaggcgagtggattctgtgagctcaggaatttgagactagcctgggcaacatcgcaaaaccctgtctctacaaaaatatacaacaattagccagctgtggtggcatgcacctgtagccccagctactcaggaggctgaggtgggaggtgtgcatgagcccaggaggttggggctgcagtgagccaagatcacaccactgcactccagactccaacctggatgacagagcaaaaccctgtttcacaaaaaaaaaaaaaagaagagaaaactccttgtcatttctctccagagttagccactcttattattttgttttgtatattcccagactcttctatgcatggttatataaagatatacatcaaaaaattaccacatccctttcttgcataggagtattaagatattttcaaatactgaggatgtcagacagataagaaagtctggctgtctaattcacatctttaaaaacatgggacaaaactcgtttcctaccagaacgctaagagttcatttcccatttcaaacattcttgtcagaatctttccccataacagccatcaagccttgcatgcttctacggttctttatgttcatcttctataatatcacataataaatgtaaaaaccttgaatttaatgcattagtttttatatactatgtctctaagcatgttgttcagctgattttttttttcctcctggcaagactttctgaagaaaagaagcaggttgttgatttattttcattgttatctgaataatgatttcacagtattttcctgtcattacagctatgctatcagcccattcttaaaaacactgatttgtgatattattaaaaagtggtactcaagcttcctttttttgggttacagattcaccgaacatttccaagtagacttctttaatgtagttttacattaatgtcttggcaattttatgatttttgtttgattgttcattttgtttgtttttggttttagtaatgtaagtgctgctttacaggaagccttaagacattcatttttagacatgaaatattcaacatctacttttgttgtctttttaataatactcttttttgcaaatttttttttattctcggtatttaaaaaatttttttatgtaaatgctactcaagttttgatagtttcattgttttgtttgccaatacatttgttcaagtgacctacagtgtttttagcactttgctatcaattatggctgcaaaactgtagtttatggctacataaactataaaaatttgtatatgagggattatactttcaagtaaaatgaatacaaaattttttggctttcatttcttcaatgtcaacttctttgtcatcatttggttactgtgattgtcacattcaaaaaagatatatgtttttctgaccaaaaagaggccatcaatcaatcaataaaggttataaatacataatactaatttgacttcccttatttagccagtaatgttaaactataaattttaaaaagccataaacatttaattaattaaattttaattattttcataacgtgcttcccttttctcagattatgaaaataagttatgaaaataagtgcttcccttttctcagattttcatataatttgatttatccttgacaaactgaccttaaaaggtcacatgttgtaatgtggccctaccaatgagtgcccaaatgtgagtaatgctgcagtgtctgaagtggtcggcaccttatttagaggaactggagcactgagctcatactgatgtcacagtgatgtcaacttgctctaaaattttacaagcccttcttactttccgtacttctctcatcatggtcagtcaacattttgcaaaatggcactggtctatggattacactcagtaccactgctacagactgtatcatggtttgcaggtgactcagaattcagtccttccacactgaatattattatcatgacattttgggaaaagtgagtgttggccaaacgtggctcacgcctgtaatcccagcactttgggagaccaaggtgactggatcacctgaggtcaggagtttgagaccagcctggccaacatagtgaaaccctgtctctactaaaaatacaaaaattagctggaaatggtagcaggcgcctgtaggcccagctactcaggagtttgaggcaggagaatcgcttgaactgggaggcagaggttgtagtgagccgagatcacgccactgcactccagcctgggcaacagagtgaggcttggtctcaaaaaaaaaaaaaaaaaaaaaaaaagagcttcaagtattatttttattgtaatgggctttttaaagctgcttcaatgagtttcatctcagattattctaaatacgcaccatatcgccaatcatattaattagtaagtatctaagtaattgagaatgctttgccttcaataaaaaagctggtgttgtatcctggaacctgttcaaaaataaagtcttgatgtgaaaatgaatataggttgagatcttgagatcaactgtcagaagtcaggctggcttgggacttcctggaagcagcaccaggctctgcgttcaagtttgaggagcgttctgccttctgctgttgtggcttcctgcaatttaaggctcgctgcttcacactcctggtctagcaccttgacagaaaatgttccctaagggatgtttcagcctctctcctggagaacaaggccatgaataaaagaggaggccaagtgggtagcattttaaagatcaaggattcttaaaaactaatggtacaatgaatacctgtttaacaaacctgcgtgttctgcacatgtatcccaaaatttaaagtaaaattaaaaaaaaacaaactaatggtgcaagtagaccaaataactctgttcttcaaacctttacctctaagaggtgaatttatatatttttaaaattttgtattcttccatcacaagcctgtaatgctgaagatgagtattctgtatctaaggatgaaatgagtcagcacttttttgaagtgtacctttatctttaaaaactacagctttatgccatatggtttggatagagtctatttctgctctaaaaaaaaattctcaaaggatgaaggtgggttgatgtgtgaaataatgtacttcttcctcaagcagtgatgacagcacattgtcttttgggacaggatagcaggaatttaatattaatatatatttttaatttcatacatttattcattcattcaacattctgaacaaaaaattttctatgtgccaggttatttgctaaatactggggatattaaaataataaggcatattctttttaaaatgcttatagtctagtgggggagatagccacataaacagaaaactttaatacattgtgataagggctgtgatgtttcaagtattattctaggtgctttacatttattaaaatatctattccctaccacatttgcctcaagtgagtgcttatattatcccagttttacagacaagaacattgagatacaggaaggttaagtgtccaaggtcatatagccagtgagcggtgctgagattcaaatccaggtcgtcccatcacagaacctttttcccagccctacgctgtgaacggaggtggacaggagctctatggagaccacagaaggggtgtctcccagcagagctggtgcatgaactgtgtctaaggggcaggcaggagttcgccgggatgagtagggaggagagtttttttattttttgttttactttaagttctgggatgcatgtgcagaatgtgcaggtttgttacataggtatacatgtgccatggtggtttgctgtacctatcaccccgtcatctcggttttaagccctgcatgcattaggtatttgtcctaatgctctccctccccttgtcccccacccacccccgacaggccccagtatgtgatgttcccagggaggagagtttaagtggcgtatgccagagcatgcagccaggtgcttggtgtaatgtggagacagccagggctttgccgaggctggatcatgggatgggtggtggagcatggccagggatgatctagaaagtaggagtgggggctgccaagtcatgtggttaggctcacgaggaggttttcttgaaggcttcacatatagcctgaaggatgaaggccgagatgctttaataaataatttcactattccaaatggaaaacatctcaggaatgttcttatttgatatgtgattactgtaactctgggatctttaaaaaaattattgtaaaacattagcttgggaggaaattatgaacttcaattttgtttcatcaaagaaattgcagagatggccttgaagaaatctaatggctgttaggtattgccttgtttatttatggaatgatgctccccatgggtcaaaggcaaggggcccacatgcacagattcattttaagttcgacccctgctgggctggtggcaacctttgccttacttacatgtttgctgtcagtgctgagcaacttaggtgtttcatttctggagggaggaactcactctgagtctaggacctcacgctctgctaccaggacgcctgcaacaaactaacacacacatgagctctgatgtacggtgtgactggaaaatatactgtgttattccagtggcaaaacccccaacactgccggatggggcaaaaagtgaaattgtgttttgaatttgatgaagatttcagaggtaaattataaaaatcttaaatttggccagtctgctccatgtttcaatccaatatgcagggcaagagagatgaatcttggtgttcatttcctttatgtttatttcatgcaaattttatgtgtatgtgtattgtgtgtgcagtgtgtgtgtgtgtgtgtgtgtggtgcgtatgtggtgtgtggtgtgtgggtggagtgttgagtatgtgatgtgtgtgggttatgtgtgtgctctgtggtgtgtatgcatggtgtctgtgtgtgtgtgatgtgtgttatttatgagcatgtggtgtgtatttagtgtgtatgtaatgtgtgtgtgtgtggcatgtatatgtgatgtgtgtggtgtgtgtgcatgatgtgcgtgtgagtgtatggtgcatatataatgtgtgtggtgtgtatgtggggtttatgtatgatgtgtgtgtgtggtcttgtgtgtatgtggtgtgtgtggtgtgtgcatgctttgtgtgtgtgtggtgtgtatgtaaaatgtgtgtgacgtgtgtgtgtgctgatgtgtgtgtgtgtgtgtgtgtgtggtgtggtatggctgagcatgtggtgtatgtatggtgtgtgtggtatatatgatcatgtagtatgtgtggtgtgggtgtgtggaatgtatgagcacatggtgtgtatgtgtggtgtatatgtgattgtgtgtgtttgtggtatggtgtgtatgtgatgtgtgtgtggtgtgtgtggtatgtatgagcatgtggtgtgtgtggtgtggtatttatgagcatgtggtgtgtgtggtgtgtatgtgtgtggtatggtgtgtatgtaatgtgtggtgtgtatgtgacgtgtgatgtgtatgtgtgtgatatggtgtgtatgtgacgtgtgtgtgtgattgtgtgtggtgtgtgtggtacatatgagcatgtgtgcgtggtgtgtatgtgcgtggtatggtgtgtatgtgatgtgtggtgtgtgtgtggtgtgtgtggtatgtatgagcatgtgtgtgtggcatgtatgtgtatggtgtggtgtgtatgtcatgtgtggggggtgtgtgtgtgtgtgtgatatgtatgagcatgtagtgtgtgtggtgtgtggtgtgtgctgtgagtgtgtgtgttacctactgatgttgaaagagacctgggacccattccctcggcgcggcagagccctgctttcctagctgtgagccggccttcagtcctctccactgacttggcccggaaagcagcaggggccctgtttggtgagttacgtttacacgtggagcatgagaaggcccacatttggctaaaaagagtacaaatctagtcccctgctgaatgaaggcctgtgtggttgtgcactgcacagtggtgcctgagctgctatctgacagcacgtggtcacctttcctcccgtgcatgtcctgggacagctggggctgcacctgaccatctgggtaggactcaggctcctgcaggctcctggatcaggctgccttcctgagcagctgcgtgtgtttacctggagatccgagagagcctctgtctcctgtaacttcgcaccttgtgtactcagagtcatctcgatgtcagccattttttcttcggagcaggttttcattgctggaaaggcatgagtggggactcaggggagcatctaagtagactctggaaattccagtggtaaactcggagcatttttgtatattgccttgggctgaacttgcatagccatctggaactctcttaggcttggtggcctgatatctatgagggagactaaccctcctttctggggggatctgccagaagagatgggttttatttttgtattagtcagcttttgctgcagtagcaaatgatggcctccaaaagtctcagtaatttgtaacagcaaccacttgtttgtcactcagaggacttcaggtccctggagctctgtcggactcagctgggcctaatggaggtccctgtgtcttttattctgggtcccaggttgaagggacagcagctctctgaggcatgctgctctcatggcagcggggagatggcaaggggcaagcagaaatgcatgattcctcttcaagttgccacctggaacggacacactttcacttttgctcacttttactggtcaaagcaagacacctggccaagcccaaggttcctggagaggaaagtgcgctctctactgccaggcaagcacaagtcacaagatgacatgtggagctgcatgaaaggaggtaggacataagagttggggacaataatctacactaatctgctggaatttatttatcacagaagggggtagtctgttgcttcctaagtgatctcatcccatcccatggcttccaatcccacctacaccgatgactcccagatagttgcattcctgggcttcccttcacactcaaattcctgtatccaaaattttacttgacgtcttacttggatacccaataagcatctttgaaatcctccagtagttcgagttctctcaataaatgctgaaaactgatggcatcatccttcactttttttctgggaagccatgagtaaagtatgtctaaggtccttcttactgaacaaggctgtgcttgacagaatgtctagaaggagcttccaaacagattctactttccaagatttttagacctgtcttgttttaggactaaatttaccagcctgctgctgcggaaccactctgctccccaccacacttgtgtactgggaaacttgatttagcctggtggagagaaagcctgtccttgggcaatagtgaatgatagagtccacgtttaggcctgcatctttctttctccaaaatccatgcttttcccactacacaaatgtcattgataataccagctactcatggcatccttaaaatcttggtgatggggatattttattggttaggaatctctatttttaaatgtattaaaaattccattccttacctgtgagacaatgtaacctgtaaaagtaagtaagaccattgttcttttttattggtcatgttcaaattacactattgctccttcctaagcagacgagctggctgcgggcctgcagagtgtgctggggattttgcagttagaagccagaagtcaggtttggccgtcatacatgagtaggagggttgaattggcattgtttttacgtcctgggagatgtgagcaagagcaaaagaataagtcatcgcctttctgttgcataacctcttcatccccacaaacgaaccaaaccaaacccacaccagccatatcaaaccagatcagaacaaagagccaaacagcagaagacacttgctgaaggcactagcttatgctgaagaaatgcaataatgatttatggactctctgtatctaacactttaaatgttgatttacggaggagtcagagcccagatattccaaccaagtgcagcactttagcttggctggcgttctgtggcgtttcaatgggattttcactgcatactttcccattcaagtgtgcaaagcatttcgagtctgaataatactaagcacattcaagattcattcaaagactgcagactttgtcaagtatcttcttttcttctgggattgattcaggcaattagaccataacctacatgttttcttcctcttttgtttatgttggtattctcataataaccatgacgaattatcttccaggataaaatgaatgctccaggtactggaaagtgatgacaatgatgctacattaagccacaatgccataaattcacagatgtgacagtatactgaggtgtggcaatagctgactagctaatttatgaagccgtaaggctggtaataaattctggccctataaacagtgtcaggcaaggtaggctgaaatagaatagattcaccaatacattgtgtagggcctcctgagctatccctgttagaatctcagaaaagtgatgcttttatgattgctagatctcctgtgccatttttttggggtctttaaataaatgactaagggccacagttttaattagctgcaaggccagagagtgaagcaggctaggatcacagtgagattaaatgggggagcaggagggaagagacaggggagggagtaagaggaatagagaggaggaggatgaggggagggagcaagaggaatagagaggaggaggatgaggaaatgtctcagagaaacacatcccatgtcttggagaaatatgtgcccaaggctcttctctggctctctggataccaggtgtgtgggctgtaattctagactccattgacttatgaagctgaagctctgaagtacattcagcttagtatctggactggctggagcatggggaaggaagtcggtctacaggtagagtgtgtcattgacaccatcttggagaagtcagggaagtggatggtggtaggtcacaatgactgttggcttaatgtgaggtgtctgacagactcagtggtcttcccactgaacccggctttgcatgaccctggttgaattgcatctacttcatgtttcaggtccttatccagggactaactttgacttattgagtacttgctaaattttcaggattgggttctgccctttaacgcttagttttcctagcaaccctggtgggtaagtctaattttattctcatttgatagttgatgaaacagaggcacaaagttgtcacttgagcaatgtcacactgctagtgagtggtagaggggagctagaacccacatggatgtgactaacctctgctcactctgtctcctgccccacagagggtgatgctgagaggtctgtgttgtaaaggaggcagtgctgttgctgatgctattgacagaatggctacattacctacaaaccattgcctttctctagaagaatcctattctcaaggagttagtattagccattttgttaagttctgttttaaagttgttcccccccaacctccccgccaaatgagagagcttgcctgctcttgtccacttagggaccttatagttaaggtgtcttaagatgtcaccaaccaaaccttttgcttttggggccagaaaaggtctattagagtcaatctgctccacgttactttgtgattctcactctgtgccactttatccttgtcagttgttattttaggggcatgcattgttttaccggttaatgatcctgatcttcctgttttcatttttatctttcctgaatgcacctgttcgttccgagatgatcatctgccctgtttcatgacaaggctgttttcaccactcagtgcctcttaacaggatggtcttgctccttgcttggctgtcaacttctcactggggctgcattcttccagattattctggcttagtcttgcttttccagactcttctactttctgatcctactgttgatggtctggaaggctctgctctccccattcccattgtcaagtgggcaaagttgtaaatggtactccatgacacgtgtgggcttgggcctaccccttattcattcttttaagcctcgtcctgccaggtgctgctccaggctggccttgtcctgcctgtggtctcttccttctgtcatctgttgtctgggtcggtgccactgtgggggaaaacaaaggccttccctaccttcctgcccagagacagattccatttagttcttcttcagcagtggactctaaacaaaccctttgggaaacaaagacaacagatatgaacatgacatatcaaatatcaacaatgggatggggatggtacagaaacagcaggacatctctgtaccatctaaatgaaatagaaacctttccagtgacttgagttagtacttggaatagaaatgagttcaggacttgtcctgttttatgttcagtgaatgttatatgaagagatgaaggggtgaggaagaaaggttaagcaagcagaatgcctactatatttatttatgctttaaacacatccattaagacccttgacaatgaaagcatggatataattttaaagaacattttgcatttattaaacaaaatgttctcctaaatgtcagtgatggactttagtgtgtgaagaattcccaaccttgggcaggtcatccgcctgccctttccatgtggttaagggagaggctgaacacatgggctcatttcaggatcctcctggaagtccattttggatctgttatggttggaggaagggctggaaaagaaaatgtgcctcatgcctgaggtgtgtttccccatgagcagctctttccagaaggattttttcattaaattgttaaaaattgaagtcatatttatggtgccatcaaatcttagaattggaagaaacttgatgtcatctctgtcaaaattcatgagggaataaatgacatttaccaagacacagccgcattattatgttatcccttcgtggaggtcattcagaggttgggtttggagaggcagcatatgatgtaactccctaggtctctctgctagaaattcaggcaggtaattttagaagatgtcatatccctcaatatattttcatgcatagattaattgtaggtaagagttatatcacattatttactttgggaatctccagggaatttcttgatgttctgagtagtagcattgttggaatcccttggctccaagaaaatttcagcaatcaaaactgaactgtatttaaaataaagagcaagccccatggacgaaggggcatcttagatggtttccaccatgggacttggagggcatttcctccaggcagtgcttaggataaaaatgaggtgggggagggtagacttccctccctcttagaggttgaatgttttctgagcagacttatggtcagtttctttctgcatccttgtccaatccaatccaatccagtccagtccagttcagtccagtccagtccaaaccagaagtcatttacaggccatatatcttatacctggaatagtgctaggtgttgggaaggcactgtctcggtgttcatggtcaagtataagcaacagtccatgctctaatgtccctcttatctattcttattcatgaaaacatttttttctgagtctcagttcaaaggtatgcaaaattattgagacaaaaatagctttgtgtgttaataataacccatcattcataaatcattcattcactaggtgctttgccgtacacagaggaatcccaatgatcaagacgggtatattagtccattctcatgctcctataaagaaatacccaagactgtgtaatttataaaggaaagaggtttaattgactcacagctatgcatggctggggaggcctcaggaaacttacaatcatggtggaaggggaagcaggcaccttcttcacaaggcggcaggagagaggagagtgtgtgaaggaggaactgtcaaacatataaaatcatctgatctcatgagaacttactatcatgagaacagcatgggggaactgcccccatgatctaatcacctccctttcttgacacgtggggtttacaggtccctcccttgacacgtggggattacaaattgagatgagatttgggtggggacacagaaccaaaccatgtcaataggtgtgactacagtgcctgaaccagagagaagctgttgctgactcttggcagctcctgagagctgactgtatgcatctcttctcaactctgcattcagtgacatcccattggtagcttgaagttgactgtaatggaagtgttcacaccatggaaattggcagtcagtacaaaccagggcttcctccccaaacaaatgatttttcaaaaacccttttgtcagcacaccactgccagacactctaaataataatcactctaataattgtcagctatcatttattctatgcttctacatactagatgctttacagacttcatctcaaaatctttatagctacctctgagatggtgtctactaattagaaaaaggtcacaaaactagtacatgtcagagccagaaccagaactaactctgaactgaagaaagctcatgattctaccctttttgctttactgcctcctttacttgaagactttttcaaagccccatgcttgcattttttgagatgccttcccaccttcacctaagggaatgggactcaagaaattttaggctccatgacaagtcagttcacatgacattttgttcagataaccattttattcagtgaggtaattccgcatctccccatttattttatatcatctcatgtgacattttatctattggtgaggcagcagtgagttttgagggcagcactggtattgccagtttaattctaaaggcagtttatttgctttagtaaggtgaggaattaactggacatccatggttttatggtgactttctgattcttgttgtactgaataatagtgtctctaagaatcaatttgcactggccttttcataataagattgttattattatgagatcagttgttaggaaattgcttgggatgggatttgggtatctcaggcagtgatgtaatctttgccttaataataattaaatacctaagacttctgatacttcacctctgatacacacttacacatttgtgctgagtagagccggacaatcttgggcttcccccagagggagagcctgtcccaggaatctcatccaatggccaaccagaataataccttggccttgggacaggatatttccccaaaggagggactccctgctgaggccacgctgaccatgctgtgtcttttcttcccaactcaccgatcagataaattggccttcctccccacatgtgtgtttgtcttgcctaaggagagacctggacttgagcaatcatggaccagtccagggctcaaggaagccgttcgtccccaacccagtccccttctagccactgcctgccacctttgcaggtagtttcatctgcatggtcccagggtggctgctcaaggaagccattcatccatcccagtcgccttctagccactgcctgccaactttgcaggtggtttcatctgcgtggtcccaaggatggaagaggtaggagggtgtccctaagaggaagagcagggcaggatttcccagaaacccagagtagatgtctacatacatctcctaggccacaactccctctcatggccacatcttataaggaagcctgggaatgtaatttgtacctgaagatattgtggccctgaacaacattgggattcattgtaagaacaaggggagaatgtgtattgactagacattaatgctatccaacgttctcccatactttgacatcacatttcttctatgggctcatggaaacaactgtttctcctacatataagttatatgtaggaggaaggtgctagaaaggtccctggtctttggctctgagtcaaagcgcttagcttttagctggtgcccttccattgcatatgaagcctgagggaagaatcccgtttgctgaaccttggcttcccccactgttcaacgagtggagtgggatgatctccagggttccatgcagctctagaagcccatggtgctgtatttctgaaagactttaactcagaaggtgggatgcaagggatgaggccactgaagtcctgaactgaccttgtgtcctgaggaggcttggtcagcaggacctgggcaggggccggctgaagagggggggcccagcctgtggttggtattgggggggtccccttctaggtgggagatttccttgtcttttggaagctaactgcacatggacatgaagtcccttctttacccatcgtgatgaggacgaatggagcaacttcaggccctctgtccccctcactcttacccggacagcagtctgtccactgtcagtggtgttgattggaatggatcagaggagaaagggggaaaaaactgaggcagaagcctgcttgccttcacagtgagcggcgagcaccagtctgcaggcgttacctgctgtcatttgctgatgtctgcattttggggactgagctatttgggagagggcccttatgttctcatgaaaacgatgaacaacctactgcaaacaaaggaaaagaacgtcatgatttctataaggactgcttttcacagtagttacgatgtggtcagggggcgtgctttagtgactagctctgaattaactctgatgagagtgttagaggtttcatagtctagtcacttagaagacacatgtcaactgtagactggaaaggggccgcgtgtgctaactttcgttcagaaaactatgtctgactaaagatcagtgatttctttttttaaactcacagcagtgaaactgcttggtctatttgtgattttactaaacagtcttgactaagtttatgatgtccgttcactgcttcctcagatgaacaccttcttcctatgcggtgcttaaaatgtagtttaagagtgaacattttatttaaactgataagaatcagcaaacaaatggagaagagttaggatttcaatgggccccgcctgttagtaatatacatctacagatcgttaacatggtttgcaaatatctactgcttagaaatgtcaaagaaagggccgggcatggtggcttgtgcctgtaatcccagcactttgggaggccaaggtgggtggatcacgaggtcaggagatcgagaccattctggctaacacggtgaaaccccatctctactaaaaatacaaaattagccaggcatggtggcaggcgcctgtagtcccagctacttgggaggctgaggcaggagaatcgcctgaacccaggaggcggaggttgcagtgagccgagattgcaccactgcactccagcctgcgtgacagagcgagactctgtctccaaaaaaaaaaaaaaaaaggaaatgtcaaagaaaataattctaatggttcctagttagttactgtgtttcattttttcctctgtttttcatgaagacttacaatgcttcagataaaatgcaggatagagaaaggtgagggggtatttttcaagacacatttaggatttaatatgtacagatgctcttgatataaaataaatttgttgatcacacataatttcagcctttcaaaacataaacatggcatacaggacccactataatgatggaaactggaacatgttttgaaatcaaataaaatgtcaaaattttattaatatgctttaatcaaaaagctaatcctattactttatttctaaaataagaaagaaaaaggggaaaaaaagaagaaaggtaaaattaatgtaaaccagtaacagttttagaaagctatttttgaggaaaatgtgaaggtccatttcaatgggatggtaaaggtttgtaaacattttgtgactcctcttttgtgaactggaacgcgtcacattcaggacgtcgctggatcttcaggacattctgtgtgtttttcacttggccgacatttgctgcagtcttgggaatgtcacccgcattcttcctcctatttatgagctagagcacatataactgacttgagaaaaatgatttaaaaggtctccaactaaatttagtttattttaaatcaccatgttgactcaggaaaggagcttcacatgaaccccccgctttttttcctcctgcccagcactaagtttataaaccagaaaacaaagatctgccttcacctcccttctcttttgtcatttacttttagaattccattaacaaacacctattgcctgcccactccgtgcccacccctgtcctgggtgccgaggatgcagcggggagccaaacagatgaatgtccccatcctcaggcaggagacagacagacaataagacaaatgagcaaaggcctgctgtggtggaaataaatgctaaggagagaaaaatgaggcagaggcagcaaatggagagtgttgggggttaggattttatagagtgacagtcatggaaagactgacactggagtgagggcctgtgggaggcgaagggggagccgggagctatctggggaagaacattccagacacatggaacagccagttgccttgccagttgccttctgagcttgaggagcagcagggaggtcagggcggccagatggagagaggggaggagtggagatgaggtcacagaaagaggggccacgtgatgaaggggtgctgccaggttccctaagggccgtgggtctgtgtgatgggaagcccagcattggcgggttgtgagcagcgggagtgatgtgatctgatggatgttttcgggagatcttgctggttgccttgtggacagtagtttcaaggtttgaagcagggaacatgggaagctaacataataatccagttgaggggtgacagtggcctggaccagggacgttgcagtggaggtggggaggtgggcggtgatgagggcatgcgtgttattctgcatagggtttggatgcgtggcacgaggagaagaagtgagccaagggtgaagcccttgtgttgggtctgagcccctggaagggattacctctgtgttccaccttctgccagtcctgctggtttgtggatagcagggattgcttccctccaaggcagttatggtgagagcacatgggaagtgatgagggctcttttaatctaaaacttcttttctcctctgtgtgaaacactttcttcctctttttcaatctcccctcaagcctattcttgttgtccttggccagtgcggtgaagcagttccttgcattgtgtgtaggacctcgccaaggacagagagagacacagcgtgggttggtgttgcattgcattagaggtggccaagatgcacagtccagcccatgtggtcacaggaaggaggggtattactccgtaggtttcctttctcacaccacagcacagaatgattgctcagatcaaacattcattgtctttaagcactggtacaattgcagttcaatctcccctgcttcagtctacactgagttttcattgagactttgaggaattcaagcccctcttgctaaacacacacacacacacacacacacgcgcgtgcgcgcacgtggactactagtatcaggtttactaatgaaagagctgaatgcagagaagtggatggatttgggcccagttgatctgtggaagagggagactgagtctgggctctttactttcttggatggtgaatgttgccgtttgcatagaagcccgcatggcagtgaactaacagtaaccttgaagatgtgtttcatccaccacccttgaacccattatggctcaagcttgggtattgcttttaggaatctagcattgtttcaggaaaacattttagttcttattgttttctgggaagccttactttgcacaagggcagtggaagaaaccgaagtgcatattaagtgccatccattacttgctgtgtgtttgaatagtgatcgcagcgttgctatgttaaattgcaaagaacctgtgaacctgaatctccctccatccttcccttgtggcctctcatctctcgccactctaaaggcaccagccaggtgctcagaggagcagaagccgtgttaaaaatggcttggagcatttaagtaacttttctcctttaattctatttatttgaaatatacaaaagtccagtcataataaaacgaaaaacgcctttgaccaaattcaacacacgctaatgcttggttgtattgtcttctgagtctttttgaagaaacacagcttacaaacagagtgcatgattcatttgatccttttcttgcccagtctcttcctcttccatttggtatccagaaatgggtgtgttttcttcctgttcacgtgactctgctttctctttgcctgtatacagcacagatttcacacatatgcatgtgcacctgcacacatgtgtattctataaatgtgtttataattttgcacatatggtgttattctatacatatccttttgcaagtggttttttcattcaaggttatgttgttgagattatccatatgaatacaagtagattgagttcacgtactgatttttgtggtggtttagttctttcataattttctttgattgcctcataattgtttttatttttttaagtttaagtctttttttttgagatacctttgtttttttccagtgtcgagttattgtggtgagggagcgtgttgtgtggatcttcattctttgaaatttgtggatactttctttgggatttactatgtcgtttttagaaatcttccacatgggcgtgaaaatagtatgtattttcagtttggttcaggttcccttaatgcctgctagatctagctggattgttgtgttttcagatctttgtataagtggtgcattcagcaaattttcttcccctttgccttcatccacgtttggacagatctctcttttacatcccttgttactgtctggagtagattcaagagctttccagtctcctttaatcacttaaaagtctgatctggtctaataaaatctcttacatggattgtaggttcttttaccatccccttgtccccaagaaagacactgacaatgggagatgatgggtatgttaatctgtttgactgtagtatcactgtgtagtaatcattgtgctgtgtctatgtatatccagatgagtatttcaaaacatcctgttgtatactttcaataaatatatgcaattttaaaacccatggaagatcttacgtgattctacccttcttcctccctaaaccgcctcccaagacatgggggatgggctgtgggaatctggagggtgaggtctgttccattgtttgtacccacccctttgctcccaccccactggttctggtgcccctgtatgtggggtgcatagagggtgaaagaaattgtctgacttttctttcagacaattcagaatgtggggtcccagacacctccaaaccctcagctttaggtcctggccactaaatgtcaggcaacaggtgaagtctcacaaagcatcctctgagaatcattgtactaattgcttgtctacttaatctagctgtttaggtgagagcgacaacctctctctataatgaaggattttctatttctgtttataattctgttgatttttgcatatgtattttgaggctgtgttgtttggtgcccacagcttctggagttttatatcttcttgatgaattattgctccttattaccaagctttgctcatctttatccctaataaataattttatcctaaagtctaacttgtcctgatagtaaagtggctattccagctttctttttgttgatagctgaacttcttttttggtatgttatatcaggtatatctttttcagtaaatgtatgttaaacttttctgtttatttatggtttagatacatctctcataaacagagtataactggatttttaaaaatcatccaggctgagaatatttatgttttgacaagtgagattaatttatatattgtgtaaattacaatatatacaaaatatatttgtagttgttactgtcaacttattttgtgactttcatttttcctgactttatcaaatttatttatgctgcctatcccaatctcctgttttgggaatgttatacactctaattttagtctggttagactcttcttacgattgtctaattatccctcacctaacaaagtctgacatcaagcattgtttctacccactttccaaacgatccaaggccctctgactctgctcccctacttccagctctcaggttactgttacctagttctttagttctgctttgttttagtaatgatttctaaagttaatcattactattatctctttaattgtatcaatgcttatcttgatttatcaactcataattttcttttaaaattgaatttaagatgcatatatatccactcataattgtctttgtttacctttgtattttttttttgagacggagtctggctctgtcgcccaggctggagtgcagtggtgcagcgcaatctgggctcactgcaagctcagcctcccgggttcatgccattctcctgcctcagcctctcaggagtagctgggactacaggtgcccgccaccatgcccggctaattttttgtatttttagtagagacggggtttcaccatgttggccaggatggtctcgatcttctgacctcatgatccgactgcctcaggaggcgctgggattacaggcgtgagccaccacgcccagcctgtttacctttgtattttgaatttcatttttttcctttctgggtttaattttcttcttattgaagatatactctaatagctctttaattaagtgtctgtaagtagtaaaatcttttggtctttccctcaacatttcttcaatttatactcactcttgaatgttagttttgcctgacgtagaattttaggttgccagttattttccagcagcactttgaaggcattattttattcccttctggcgtctgttgttgctgatgagaaatcttgtatccatcaggttgtttcctttgtagataatctttattctattctctggtcacttttaatactttgtctttgtctttgatgttttatcatgatatgactagatgtggatttaattatgtttattttgctcaggactccttttttaaaaaaaaatctgaagtctcatttctttctctaaaatctggttattatttatctccaaatatatcttctgaataatttttatccctcattttcactgttcacttggacatctcatgctagcctccacactccttaacatctctgtttttccttctttctaggtagttcagtaatttctcttaccatttttgaataactaattttaagatagtctattaaatttttatttctggaatttgtcttcagttatttcagctctgtctgttattgatttatactctgctgctttttattatggtttaaatttctgtttttaaaaagtcattttaaattaactttatagatgcttttgtttgatcttttatccatgctgtttggggtgctaatcctcaatctttttgtatctactacatctactaaaatctacttattttggtttttttcttcatgtactttacaaaattttcttgtgagcttatcttcagtgaggattgttctttctttgtgaattctctataatgtaagctatgaaagtgtctctataaagtagttttatttttgcttctgccagagccctaggggtgttgaatcagttggtcatgaatcagtttatctatctatctgtctatcatctttctatcaaccatctatctatacatctaatcatctatcagtcacctatctacctacctatcttctatcaattatctatctgcctatcttctgtgtatcatctatctacctatctactatctatcagtcatcagtctacttacctacctactttcctgtcttccatcaatcatttatctatctatctacctatctacctatcttctatcaatcatttatctacctagctatcatctctctctctatcatttatcaatcatttatcatttatcatctatcaatcatctgtctaatgacctacttatcaatcatctatgtatctagtacctacctacctatctacctacctacttctatcaatcatctacctatttacctacgtacctatctcctatctatctatctattatttatctattatctatctatcatttatctatctagctattatctatctatctttctatcatctatctatcatctatctgggctgcaacacaccatacaagtaacagaaatgtggtttttatttctcacagatgactgtttttgctgcacgtagccttaggcacacagctacttttgctaggaaaggttccagtctttgctctcctgcttctcttgggtcataagctgtgtcctttgtccctgcttgggccttggaaccccacccgcagtgcttaggacttgcacttgtgacccaaatccctatgggttcctgtggattcagctagcacttgctaactgaatttctttctttgactctggaccttggggctttctgttttctttctcttgttcttggccatgtgtgtaatgtatgtaaattctttcttgggggcagggtggatgttggtggtggttagattttctctagcatttcaacgtgcttgtaattggaataaggcctgattgtctcaggcgagtctaccatgtggtgatttcagactgttctttatgaagattatttattgtacttctagtgaagtccaggaacagcatgggcattcagtgagggaaaccattttttaaaaacagtgatttttgtgaccccgtgacaatggttactgtgccactccaagatcacatttttaatataattttgtattattggtgttgaaagcatttggggtagtatagatagctttttgatggtttaaaaagtggacagaagtggggaaggagagaacaaaaatagccggtattttggtaggaaaaactgaaaattcagcaagagagtaagtctacaactgtgtggaagctggaagagaggacagatggagaaaaatatttcatctaggaaacactgaagattgttttaaggggaacgagagcagaatcttcagttagaaagaagcaagcaagaaaagaaataatacgccctataataagtacactttctggttaacatttcacactcccaacaagagcaaatggcttgtagatcttgcagcagcatgagtgaggctaatagaaattgcatggagatttttaagttgcttctattcaagctgacattatcagagaacggtccttgagtaaggctgaggccattcttcaggacctaatgtggatatgccagttgagttcgtacttagacaggacacaatcagtaatactaacaatgtacacattatactggtaatagaagagctaacatttatttgactatttttggaaaggcatactgtaatatctgtagagataaatgtttatgctttggtaggtaatttaaaaagtctattataaatctgttataataacattcacatgaaatttcttttaattaaaaagtaatgctttaaggacattaaacaattatttaaaaactcaaaattgcctcaattataccacccttgtgtaactatcttcattttacatttgtgtattattttttcttattgtaatcatactgtacataatattttacattttctcctatttattccataatagatgttttcatgtatataataaaattctcataattttgtagacattttagaatggagatttgctattaagacataaaactagtacttttttttttttttttttgacggagtctcgctctgtcgcccaggctggagtgcagtggtgcgatctcggctcactgcaagctccgcctcccgggttcacgccattctcctgcctcagcctcccgaatagctgggaaccacaggcgcccgctaccatgcccagctaatttttttttttttatttttagtagagacggggtttcaccgtgttagccaggatggtctcgaactcctgacctcatgatccgcccgcctcggccccctgaagggctgggattacaggcgtgagccaccgcgcccggccaaaactagtacattttttaaaaggaggaaatcaagatgccaatacgtgaaggcattaacaaaggaggaaaacctctattctctaatttcatcagcatttcagcaaataaaggacactttaacctccacccccaaaaatctgaggacatagtttcaaaagaatgtgacttcagttatgttaatttcgcctaagagtactgttcttccgctttcctcctatttttctaaggatgattgaaaaccttatcgggggcccttcttgatccaagagcaaagttggggattccctgccttgggtgatatctcgagagacttacttaaggggaatgctgttggtgatttttcttgcaaaatagcagactcagtgagaaggctggcatttccaatgatgggccccagattcgccacttcttttcacaggtggaagtccttcatgcagccccagagcaaggaactgcaaagaatgactacagggtgcgcaccaccacgcctagctaatttttgtatttttagtagagacagggtttcaccatgttgaccaggatggtctcgatctcttgaccttgtgatctgcccacctcggcctcccaaaatgctgggattacaggcgtgagccaccgtgcctggccccaatctgtttgttttaatcggattttatctgaaagtcctaaaacatgttcaaatatggccactgctagagaccttgatgtctttgccattcacattttcattaacaaaggacttgctctggatgtaagctgcgtttcgggtctcttcatgtggcagaggtgtctttaggggtctaaagacaagttcttgaggagacccagctatgagctacaagtttagcaatttggaactggctccatttgatgtcattgagtattcatagtacctgggggctggacaggattttgaacattaccttgcctgtgctcctgcttgaaatctgtctgagctcaccctgcctttctggcagattttgttcttgcctggaccctggctaggttaactttctgagttgaggcatgaagctcaactttttcaatgtggtttgcccttcacttctcagaaggaaattcattcccactggaatcgtcgtttttttcttgaggactccaccagctcttggcgttctaggagtaaaaggctcatgtgtttccttcaggaaacttctagctgcttaaaggagcttaatgtgaagcatcaagccactgagacgtgttcaaagattttcttcaaaatggcttgagagggaaaaaaatcacaaagcccacaaatgaatgtattgttaagcatgacttctccagtgtggttgctctgtgctgctatttacaaaatggagcagtgttttttaatgatgagggaggattaattgctgtaaatgcaccagttgctgcatttcccttccttatcccctgccccgttaaagtccacatttatcaagtcatttgatgtttgaatatctggtgtttgtacaactgttttggtttacttatttatttatgtatttatttatttttgagacagagtcccgctctgtcacccaggctggagtgcagtggcacaatcttggctcactgcaacctctgcctcccaggttcaagggattcttctgtctcagcctccttagtagctgggactacaggcacccatcgccatgcccagctaatttttttgtatttttagtagagacggggtttcaccatgttagccaggatgatcttgatctgctgacctcgtgatccacctgccacagcctcccaaagtgctgggattacaggcgtgagccaccatgcctggctgtggtttctttattttaaaaattcctatgtttgcagtgaaagagccaaaagttaaaaactgagatgcattagagaagcaggagtttatgccacatgcaaagagcaggtaaaaagcactcaggaagacaacagaagtgactcagaagtgttctttatgaaatatgcttctttaaggattgcttgaatctgggaggtggaggttgcagtgagctgagatcacaccactgcactccagcctgggcaacagagggagacaccatctcaaaataaaaataaaaataaaaataaagtaaaatatgctcctttaaaaaagtgctggttaagctttgactacacctcatttaaaattttttaatgtcaataaatttattttaagttgcttctaggagaaaactgttactattttaaagttactatgtaggagaaaactgttatcctctctacttaaatcaagatagtgactggaaatgctggcacatggaaataggagggtgagtgcttggagtgtaacactcatgggtgcctgtcaaaggaatgagaaactcggggagtcaagtaatctaagaattcaaacagggaaaattctccttatacaggaacaatatttagttgtgattccaatcttcaccttgtatctcccctgtttctctggctagcctttggcagtgaaacctcaaaataaatatttattcatttatctctctatttttctatttctctgtatgattttttttttcttagtgagcatgtctatgacaataatatggtgttggattgcttcaaagttaactcaccacattgcctttgccaccaaagagatctgccttttctttaggttttgtaaaacgttgtaggtattttgggcccacagtgtacaactgagccttcagttgggattcagtggggattcctatcagtggtgttattcagacattaggtgggattcctgcctgatctggctgccgcgttgtggactctgtcatctgagttgttgggggaaggcgtcctactgaccgttccatcctgtcaatcctggaatccagtgatccccttgacatctgtcagtcccggcaataaaagctggtgaactctgtgtccactggtggaggtgataaccctgggtggtgtttcttccttgtaaacctgattgtaatgcccagagagaaaggaaatctaatagtggcagccatcaccattagactcttggagccagagatttccagggggggttagatgcatggataggttgcaatcccaggcttgcctttttcaaggagcgatagcagagttttgaaatcatctgaagtctcaagggatgtctctgtggctcttatagaagatgctctgaatgtgtgtttagtggttgtccaaaaaaaacataaagaatacaaacaaaaacctcttggcatctttaagccagaaatgtgccttaattgtttaattctacattcaactggttctgtgattccatgcttattacgatttcttacttttgcagctattggtcaaataaaacggagccccttgtccctgccctttatccatcttaagagcaaggaggtgtggtcagtgttatcaatgaggtccatgtgatgttggattctacagttctgccatgatgggagtcgccacatgggatggggtccctttactgtcccctctgggccccttcattgcactctggagggtctttctcctgtggagcaaacagggaccgggagacactaggctggagctgtcctgagtcttgtccttcaggggacgttttctgtcttacccatcccaccttgaaggaaaatgggaccccagctacagaaatctacgtagagctggacatttctcccagctactggcctgcaggcaaatacttcctgattctgaggttgtcaaaactgccttgatgcccagccattctcaaacctgggtgttttcacttaataccttcgccagccccagggtagccaaagccggggcggggttgggtggggattgcgggtaggtttggatctccttgtatctgtagactcttctgcctcttggtgtttgtctatctgatatgctcgctcttgtaaacttcctggccctgtcaccaacctcgtgccttatagatcacttcttttgcctcctcttgtttcctcagctctttcagagacccagtgggctgttgctcactcttggcctgattggttttgacactatcctatttccatgtggctttgctacaggtttacctggcagggccacccacccaacatatgagaaactgggcttctttgttttctgaatgagctgttctcagtaggttatgatgtaggtgcaactttacttcctccaaactcatgcctcaagtctgatagctccttcctgtccctgttccgagtctcctcaggcaccagactttccctgtcacttctagatacagtgaacagtctaatttccaagtattgagaggtccagggaagttgaatttttaaaagcctattgttcgtcctgtttcaagattctttgcatccggagctggtgttagcatcggaaacgcctctggggccatggccggctcccagcctcagaggcttgcacacccactcctctccttaccactgacctctgcctctggttctccagggttggagcaggaagacaggacaacaagggctattaatggggttacttggccatgcatcataatttggtgtcggattcccctctgtgaagcaaaggtctaaaagctgccccttgttcatggaatgcatgggagggtgcggaagggctcttgcagtgacattgccccacagctctccatggcagggtgacatccctgtgtgtgtctgctgatggtacccttcccctagcttcaccctggtacacctccagcctctttctgtcagggctggctcacccctgcaagtccagccacctgccatgggtccctgggtacaaggatatacccaggccctctcacctcaccatggatggaagctcagtgtgcccccccatggcctctccttcttacctgtccccaggcagcctctgcaaacttctctacctggaaggcagtcactagcccctgtgccctggtagctcagaaccctaggggaacccttggaggcagcctaaatggtttttttgaagcttccctcactggccttgaggttggtgcatctgcacatggatgtgaaatttccctgcctatgtccccctttcctttctttccctggggtggagagaggtgctgcacagcctctgaaactttctctgaaggaatgccaggtctctggtctcttctatcagtgccggtgcacaagagctaattgtgcagatgtctcccaactcctcctttggttgattgaaattgtgggaggatttatactgtgcagaaaccagaaaactctacacatccaccctgctcccctctgcgactgtgggagctgtatactcagcattgaccagtttctgacatatatacccttgaggccgggaaggcagaggggcagggacttgctgttgttatttaggtcactccttagagagttgtgcatggatgtgcgggcatccttttttagagagtgcaccgctgctgtgctctgtgtgctattctgagcctcagccgatggcaggaaatgtcccattttgcactcagttacttatgtggcatttgtgatacattagtgctgtgcctggtgtttctttcatgatattattccctgttttccaggttaggaaactaaaactctgagaaggtggacttgttcagggccaggtggatggtcactgctagcctctgtgcctgcactctgctgcctgcgcttccatgcctgtgaccctgtctgtggggttcactgagccagtctcatagtccggctgctgactccaggaatggggcatggggcccaggaatgcctcagcgattctgatgcaggtggcatcagatggttggaaatcacctctgcagcctgacagggactggagtcttggggttctgggagaaaatgggtggtttttagagggaagccctcctccttcctgtgctagagcaaggtcgggcttacagtccttgctatgtgtaaaggacgtggctggtccaagatcagggctttccttaactccatctagggagcccagtgactctggtttgctgagattgacctccacacaacctgagcacctaatgctgtcaatttctgctggattgttttgtgcttattaacgaactctcagttatttcccacataatcgactttaagtcaacggattgcaaatgttaattacatcacgtaatttctaaattatatgattttataatttctaaattatatgattttataattctgagttttattggcagttttggtaatttactctgtgcacattcaatttgcccagttggtgtgggctctgtgatgtgctgtctgggttcccttcaggaaggaaggacttattccctcagatgctgggagtatggttggaagatgcctcagctgtcagccctctttgggaagtgcctgctgatgatgacagccctgtccaagctcatgcctcgttcccaggacatcctacaaccaatgactcatcaatgcaggagtgtcagccagggtgctccagaaagatccaacaggatggatgtagatagatctttctccctctctctctttctctgtgtgcgtgtgtgtgtgtgtgtgtgtgtgtgtgtagatatatatagatatctctctatatttcaagttccttaaaataaatcttattacacccatctttatgtccatacataaatgtacacacacgtgtgtttatatgtatatagatatagagataaaatgagatatctatgtatggatgtatatgtatgtaaatatatatagacagataaaccaatttcttaaaaatacatctcattatattgatccatatttataactgtgtacatatgtgtatatacatatgtatgcatctagattcagatggatgatagatataatgagatgtattttaaggaattagtttacacaattgtagactggcaagtctgaaattgggaaggcaggccagcaatgatctttccttttctccagagtgggccacagcccggtgctgcaggaagaagaagatattaccattaaaaagaacagccaagctctcctggataaaaggaagccctgggaagttggtgtctgctcagattacctacacaagagtctcagtgctttttggggagactgccttttgttttcagaaaatgtaggtggatgtgactgagttgaaggtgggtggtgtgatgtctgagtcttcctggtgttggtccaccccatgccttaaacaccactgtggggaacctctcctgggaggtaaaccacttccagctcagcctgaaaccaaccatgttcttcagtcttctcaagaaggccatcttggctgggtgagattttcagaggttaattcagagactcgttgccaaaactttgcatttcagagatgtccaggaaactaaggaattctccagagaaactgggaggcattacaacagatattagcttgcatgtacctgtgtagttgaatttctgtcatcaggacagaaggattagttctgtcaagtaatcaagtgtcacacggtttggctcacaaaggttaatctttccactcttcctgggctttgactgtgaacaagtatcgctggatcacaaaagagagggccctgtggtggagatgactcacagaaagtgcctcctgtttgctttctctgctgttgaaccaggatgtgcctttctctacacttagcagacagtatggtcctcaggaatacacagaggctggttttgaattccgagtttgaatttgtgttcatttgcttaccctacctgtgatcttcacatgcctcagttttctgagaaatgagaacaggaataatcacctttcaagctctctcaataaatggacctagtgattaaaactatgaaaggctctgcctgcaccttgcactgctgaagaaagctgttaccacgacacagaagaagggcagtagccttgctgggttaactgggttcgtgatgagcttattttttacaaaatattaagatgttctagctattataaaaagagaccccccccccccaatcccacaccaatttttatatagagaggatctggtcctgggattgcaaaacctgttcagattccagaaggctaggccagcaaagaaaattctggtacttaattgtgcctttctcagcaaaagaaaaaaaatgctgaataaacctcataatgcacctcatgaatgctacaaattgaaaactcaatgacatttcaagcaagaaaagaaccccctagtgatatgttggttcaccaggcaggtgtgtgggaagccagatggccagcgaggttctgccctccaggaagggtttgccctccaggtgcggaccctctccccatgtcactgagaagctctttccatctctctccattcttcatcacagtctccatcttaaaggctacacactgcctctggaaagtcttgctgttctttaagggcagaacacttcagagccagcctccaccgctcccgccctgcttctgctctgaggtggccccagcaggagtaccagtcctagaccctgactgagcagagctcccgggcttccattgaccaacctcacaggccccggggttcaaggatgcacatgctcattcttggggctgaaacagaactccccatcttcactgagacccacatttcctggctttccatcctgctctcctctcttccctgcaccttctctgcttaattggccaccaggctctgacatgtcttctcatctccaccctgtctcttgcattccgaggcttccccaccttcattaccttgggctggatcgtggcagccatcctggaactggcctctctgcctctggccttccctccctgtagtctcctgcctcatgaatcttcccaacagcctctttgggaaactttgctcggcaggtgctccaaaatcttcagctattttcacaacaaggttcggacttcctagcctaaaagtctagactctccccacgtcttggccctttgagatccacacaaaccctcatcgtccaaccaatgtgcctgccatttccctcttgcctcgggctctcctgcttcttcatttttctggaacttctgcctgagagacttgtctgatttctctccagcctctctgttccaggccattgtgcaaaacccctcaactctttttttgcttggcaaatcccttctcagccatctcaggagatggccaagatggcaaaatcatttttacagtttcgacagggggcttctattaaatggtctcattgactcctcacgtaaagtagctgtgttggctccctgtacagagtcttctgcaagctgcatttgatttctgttttgcctaagttattattgttgtctggattgccttcctctctgacgtccatataagttcttcctatttttcatgatctgggttctgctattcaaggctgaaatgccctattttcctctccttcagatgattccagttcttcttactggagcagctatgtggccccttcatctgcatcacaaaacctgggtccacagccttcctctcctgcaaggcatgtgggctctttgggagtgagagacacaccttgcaacttttctgtcccatatggccccgtccacagctctgtgcatggggtgagtgctcagttcatacttgttaaaggatgctttgatgatggagtccatggaaaattctatatagatgcagtgcatacctatgaggcttcatgggttaacggggaggcatgttgtcaacctcaggtcctgagtgtcggggaagcatgtttgtggcggggttcatgatttctattttaaatatgaaggatgatttttaaatttttatttcccaattgtgtccagtacaaatgaggtgatctttgtgcaatccttgtaaaccagtcaaaactcagtggaaatggaaaagctggtttcattgctcctggtggctcagtacccatcactgaaatcccaaagtgtttttggcaaagccgatgggtatagaactattttcatgatgagttcaaggttctttgaaattccccacccttaaagagcacaaggaaaccttttcctgttggtattctctaattttttttttgtcaacaatgtgatatacgaattgggaatctgaaatattttttcttcttttttctttatgcttttaatgctgcttgatttttcttaggaaaggttctcacctctatctgcctctctatactatatctgcctcctacaagtatcaaagtgatgctgaaagaataaattttatctaaaaaatgataacttgtaataaagtctcttatatgtaatctctctttaatatgacttgccatttttgttctattatagattattttgtacttgggagttttgctttatctaaaatattgagatgctaatatgatattagctaattgccaattgggtattttatatataacctcagaagtaattatgtattttttttctgtccagtattgttcatttgcaaatataaaacagatctcattgcaaagatggttgtctatgcatttgcttctttaagatttgaccttgtaattatatcgagacaaaattcattttgaaggtcaaatttgcctctaaaacagacttcaagattgtgttctcaaagatatattgtgtttgatgaactttcttagaaatacataatgcttgtttaatctgtggcttgcttttcagttgtctgctcttgtaaaatgactaaatatttgtttttccagttgagcttaaggaaaaaatccctggtaaatgtgttttcttgaacagaaggctcagtgtaaagcaggagagaagtcatatttatagttgcttttactttcttgatgtcatccgcctttcaaatgctgtctgttttccttcagatctctcgtttttacaggggggccccaggcagaccctggttcccacactgagggacatggcgctgttttgctgctgtgtgttttgttctggtggaagctggcagccacctcaactctgagatcagctcaaatgctttacatgcaaaacggcaaggctgagaaagaactgaaagtttccttgggtccaagaacgtcttgggctttacaaactggtgcccacaggcacattaatacctgtgtttatttttctatctcctgacacacacataaaaaatgggaagacgcactggggagaaaggttgattgaatgtcatgaatgaaagaaaggttgaccctccaaagcaacatgaaatgaaaccaaaccacaataacaaccaaatgaaataagactgacaagaagtatgcggtcatggccaatacatggctcagacatgattcatggagacccttgaaattttcttccagcaaaactgcactttaaaggtttaaatgttcaacatttctctgtgacttagagtaaaaggggaccctttagggaattgtataagagtctaaggattgccttactgagttctaaagtatagcagagttagtggtgcagcagtttacataggaaaagcacacacacacacacacacacacacacacacacacagtgaagggagatgacaataagcagcccacattttgggctattaaccaggtttagaaagcaaaattgctcaagtgggagtaactgaagagcactcaagcctgccacttttccagatttggaactccgcctccctggtttctcctctcatcacagggtctcagcgcctaggagagcagctggctatgctggcttcacagctttcctctgaacactcttttcttatcaacagttccaggcttcttggtctctctttggcttctggagcccatgtgtgctagagctggctcctcccaactcgctagagccggcaatgatgcgttagagcacatcttttcccaactctgcattcagggactcccctgggttccttgcagttgcccatgatggaaatattgactccatagaaatgaccaagtgcttcaaatcaggagttttcctgtgagagcctgttgttagccatctggcagcacaccccttctgagacagtggggtcccaccttcctgccagaactgaccccaccattgtgctgtgaaacatggcatttcctctacctcttccccagacagtaacgtccttaagtgccctggctctagaatctctatctcctctactccactggctccctttatcctgtctataaacatacctgcttttctcatccttcaaacagactgagcaaataagataaaccttcttttcattggtttgtaaatgccttgagggcagggctgagtcttgtgcactagtgcatccctagctactagtaatttctgaagtacagtaagtgcccagcaaatgttgggtgggtgaagccagttagtgcttttcatttttgttttcattgtttttttggttttgtttgtttgttggttggtttgttttgaggagtctcactctgtcccccaggctggagtgcagtggtgcaatctcagcttgctgcaacctctgcctcctggattcaagtgattctcttgcctcagccttctgagtagctgggattgcaggtgtccaccaccatgcccggctaatttttgtatttttagtagagataaggtttcaccatgttggccaggctggtcttgaactcctgacttaaagtgctgggattacatgcatgagccactgcaccctgtggcattagtgcttttctttgaactgccactccctccctaactttgttgctcaacttcttctatgagtagcctacattgccctttgcatatcctccctgtttttaactactgagccatttggcttaatgctgtcaggctcctacaacatttttagaggacagcaagaggttttaagttgccaaatccaggacctgttctcaatgcgtatggttggttgaatgactttctcctggacatgaatctctctgcagttgcgacactgaactttccatcttactgaatgtccttccttggcttccatgacttagatctttcctagtttcctccttatgctctgactgctcctccttgtgttcttggctgttttccttttccttctcagtctgaaaatatttcagacactgccttcaatcctcttctgcctccctaactcccacttagactcttttgcccctttcacccctggactttccaataaagaaaaaagaggaaggattgcagaatttctgtttttaaaaagctctccagctgattgtcatgctcaaccaagctacactctggcattaaggatcaagcaaggcaatgggggagttggcatttgtgatttttttctttacaactctgtctctctcactaggctctgaactcattggcaaagcccaaccctagttagtgtttagctcagtgcttggcacatggagggaactcagtgcgtatggatggatggatagatggatggatgaatacatggatggatgggtggatggatggatgaatacatggatgatggatggatgaatacatggatggatagatgaatgaatacatgaatacatggatggatggatggatggatggatggatggatgaacaattgtatgaatgaatggatttgaagggcaggttgaatttagatcatggaagaagacaacattatcagtgaaatcatcccttaattatagagacaaatcattcaacatttctgagttcatactctgtgccttgtgggacatacaggtgaaagactctttccctgcagcgtgcttccttggagaacacttcccttctttcctctcctcatctatttcctccacctttcctgctctcctccccattcccacttactgaaatgctaagtgcccatcaactgctctgttgctgcatctttggtacctctcttgtgaccctcaccacattatgcctccactcagtaatttaatttaaagtataacctctcatcatagcctttgtttattgaggggaggttccatgccacctccagtacctggacactcaacatgtggatagactgagataggccacttatcatggtaatagttatttactaattcttagatacggtgttgtaagtatggagatctatgagctgagctaatttccagcagatcattttattttaaaattagaactgaagagcatactcagcgtgtctgcgtgactatggatacagatggtaaaagagctgaaagcgacttttttgaacatggctactagagtgtatgggatacttttgctgccagtaataacaataacaacaaaaatgaccccaattcaaaatggtttagttaacaaggaaaatgcatttgatgtgcctagctgccctgccatgagatgccttcagagttggtttatactcttccctaccataggtagaaacacaaggacttccctcctttcccccagatatccacagcacattggttttatcctcaggtgacctcttctcatggtcctgggatggctctcacagttccaagtgccacacagacaggactactactctatggcctttcttcatcagccaacacttttcctagaagtcctctagctcgcttccccgagtgttagactgaccagaattatatcatgtgcccttccctaaaccaatccgtggtgagaagagatggtgcccagtgataggatttacactggtgttggggctggtcatcctccgtgggtcatgtgggggcaggcagaacacccaagcaaaattatgtttccttccataagggaggaagggcagccagttacgtctgctgccattgccacctgtgtgtggctatacatggaaaaagcaggctgctctgtggctgtgttcaccataactgtggggatggacggctgctgctgctctgtccttggcattgctggtgggagtggagccttctccccaggctgctgtcacgcacgtggggtccaggctacttcttggagtgagggtagcttttctggagttttctttcttcacagtagccagttccacctatggaatattcactgctgcttacacgtggtggccagggagatctgtgcgtagagaatggttctcttgtctagtgttttggggaacaaggtggtcattcattcctgaatttaacaatgcctttgctgggcatggtagctcacccctctaatccaagcactttgggaggctgagagaggaggattgcttgaggccaggagttcgagattggcctggacaaaatagtgagatctcatgtctccaaaattttttttttaaaaattagccaggcatggtggtgcatgactctttttcctatagtctgagctagttgggtggctgaggtgggaggatcacttgagccagggagggtccaggctgcagtgagctattgacaccactgcacaccagcctggatgacagagagaatcctgtatcaaaacaaagacaaaaacagaaagcagtgctttgcatctgtccatctggaccatcagcaaccccttctcattgaacttgcaccacctctctggagtcagagcctcttactcacagttttcagatgagcaaactgaggctgagggaggttttgttggctgctagtgggtcagcataaacttggggccccaagctcaaggttctttctgcctcaccatggctgctttgacaccttaagcttacccttcaggtactcagatgtgttcagctttggccatttccagtccagatttcctgatgatctggtgccttcttctacctccccatacagaacacagaacctgactgaatactgaatcccaggggtcatgtggtttgtcccactggccaggggcagggcttggagggtggtggtggtggtggggggtgtctcttcaggtcatgtgactccttgaccttggctttctgccgttgctggaccaggggtgattgagctggggtgagcagtttgcactcttaccaatgttctcaaacgactgtatttttgagttcttgagtctggtttacataattttctgacttttttgctttgatgaggccagctcacgcggctggtagtgtgcctttctctggcaaagcttctcttcgtggacttcgtgacatctttttggatcctttgtggcttctcagctgtgttacacataatttacgttgtcaggtaaatgctctcaggataaatgaaatattaataacgccataatgctaatttaaaaatacccattgcacatatttaagagaatcctctctgggcttgactctgggctttaaatcaggcccaacaatgtctcaaccataaatcaaattatcctttcagcctagtagaggttttggcataaaaacctactatagaatagcatagtataggaaatcttagttcacgcttttaaaacttttattccctttgcagaaattggaaaccaaatactcctttaaccacttatccatgcaaaacagttaaccaagcaatagtcaatattggcttttggatttggggaacatgtttattaactcaagatttgcacagctttggccgggcgccgtggctcacgcctgtaatcccagcactttggccgaggcgggtggatcacgaggtcaggagattgagaccgtcctggctaacacgatgaaaccccgtctctactaaaatacaaaaattagccgggtgtggtggcgggcgcctgtaatcccagctactcgggaggctgaggcaggagaatggtgtgaacctgggaggcggaggttgcagtgagccaagatcgtgccactgcactccagcctgggcgacagagcgagactccgtctcaaaaaaaaaaaaaaaagatttgcacagctttgcaaagcatgatctactgcaccgtccccctcccccatccccttgaacatcaggctgccgagcagggaaggccagctccttgggcccatgtatgactggatgggaaaagaatacattacagtgaaataaatgctttaaaagcatgtttaggattataaaatgattattccttagttttctcccctgattataaagatgaatatttttggtttagaaaatttggaaaatacacaaaactataaagaaggaaataggagttcaacttttcagatgctatgtataagtgagaggatgcagtatgtgtctttctgtgcctggcttatttcatttagcataaagttctccaggtttgttcatgttgtcacaaatgacaggatttctcttctaaatgctgaatagtgttccattgtgtatgtgcaccacttttctttatgggcgtttatgttgatggacacttaggttgatgccataccttgtctgttgtgaataatgctgtaatgaatttgggagggctggtacctctttgacataccgatttcattttccattttctttggatctatctccagagtgggattgccagcaatcatgtagtattttgatttgtaatacataccaaattgagttgtagtacatttgtaaaacatatagtattttgttttgtaattgatctttgtgtttttgaggaacctccatcctgttttccataatgactgtactgatctacgttcccaccaacggtgggcaagagttccctttttccacatccccaccaacacttgtctttttgataatggccattctaacaggtgtgagatgacactcatcatgatttcgatttgcatttccttgatgattagtgatgttgagcgtaggggaactggggagatgttggtcaaaggacacaaaatttcagttagacaggaggagtaatttcaagagatctgtgacttgaacttgaatagacctatgatctattgactgtagttaataacaatgcattatattcttgaaaatcactaagagtagatttcaagtgttcgcaccacaaaaaaataagtatgtgaggtaatgcagatgttaattagcttactttagccattccaacatgtatatatatatatatatatatatatatatatatatatatatatatatatatatatatatttcaaaacataatgttgtacacggtaaatatatattacttttattagttggtttaaaaaataaataattttaaaaatattttaaaaagaggaaaataagaactcctatttcacactggaaagccaaagaccatgactgttaaccattttgataacttttctcaggtcatcctctttcctttcctgccttccctcttttatttcatccacttatttttttttctttgtgcaatattgggatgatattatgtacgtggtttagtaccctgatttttttcccccagtaatgtgttttattttctgtatcacaacaaatgcttttctgtgacatctgggcaatttgcctctatgcataggtttcgaagacttcaggtggagttggctgggggcttcctaagtagagtgggaatgtcaactggcctgtggaaccatttagaaataattctgcccattacaaatattgatttgatgcagtgcttaagatgttttctaatttaaaaatattttcaacggaaacagatgccatttacaatttctcatgttgtaaggattctactaaatatattatttggggattgaatattttacttggaaagttgtgtaagaaattcctgtatctaaaaaaaaaaaaaaaaaaaaaaaaaagaagagagagagggactggattttggagccgtgctacaggcatattgtaagaaagatttttttctttctatctttttagctagttagtgttctaagattttaaaaaatacagatcctcctagcatttacaaagtaaaagggttgtttcttttctgggactatgacaattgcttaattacagttctcgggatgttttctaaattctaaatcccactaccctgttctgagcagcagaaagtgctaacagaatgatctagggaagccattattaccaaagctgggggctataaggaaaagaaaacattttcaaaatattttctgtgcaaaagcatctgtgtgcttcagcatgccagttaggcttggccttgctttcactcccgatttttgcttcataatgctgggcttccctcagaggagaggaatgttgtcccctctttttttaaggggaaggatttaagttctttccccttttaggatattttaaaataatgtttaagaaataggttttgtcggtacatgtacagttgatccctggtattaatatttgaaaacaaaataaggtttaatattcttcaacttatattcaggttattccaggatctttggagacccgaggaaagccgtgttgaccaaaagcaagacaaatgactcacagagaaaaaagatggcagaaccaagggcaactaaaggtaaaatgaacagaacccaaataatcttatgctgcctagtcaggaccccttttaaaaaatgtggatatgtaaatattttgtatctttcctatttgattttcatggttccaaacctccacagaccatttctggattctttgctgtacttggatgaattatgttggttctacatgacacccttgacttccctgagataagatgccccattgcccagcactgcctgttcctggccctacagtgtggagattttagaattactgccttctcagttctatagtcttcacagcccctcttttctccatcactgtctactctcttctcccttttccagaggaaccagaagctaggtgtctacagactggtgcttttacgatatttccatttttctatcatactactacatttggcttacagtcattttgtggttatttcacctgaatgcaattgaaaccttctttcaaggggcacacccaggcagtgaatctttgtattcacaaaacatgccaaaaaataaaaataaaatccagttgaagaaggagagggtcagctccctctctctaaggcatgcccatgaggccagctggaatgctagggctcccctggagaagcaccgcagggatcaaggttatgggggtgctcacatgacactcatgcaggccgcagaatgtatgagtccctcccttgccagaatgaagccagggtcgatcagtggaaggaatagtagtccatggagcctgagacatgccttgaccagggtcagagttcagtgagaaatggtacaattaaaatggatgtggctcttgaggccatgccctgactgtgaggcctctaatctgcattagttaagtgactttcgtaagtccctccatagaggtgatttcctttcccagtgctgttgtaacaaactgccatgaactgggtagcttaaaacaacagaaattcatcatctcaccgttccggaggctggatgtccaagatcaaggtgtcagcccaagtggttccctctgagggctttgaggaaaatctgttccaggcctcttttgtcttttccctgtgtcttcacaccatcgtccttctatacaggtctgtctttaaatcttgtccctttttttgtaagtggatcagtcacattgggttaggtcactaatgacctcactttaatttgattgcctctgtaaaggccctacctctctatcatcacatcccgagggaccgggggttagtactccagtgcatgaactgggggagagaattgatacaattcaacccatagctataagtatttttattcatttggaaagatgagccatttcctactgaagaagtccattttcttatttttagataaatgtgggagatgcattcagtttctcatgctgtcttctgtctcccgctggtattccctgcttagctttggagtgcaggagccagggctggactgggttaaggtgactggggcacaggatttcgggcggtgctcccctttaggtactgatcctgcacttgcatgagcctgagagggagagcctccttaaatcatgggccctatgtttctccctgcctccttcttcctgccccataagggaggcctctgccccagtcaggggcctggtgtgcttggcaggaatcaggcctgtgcagttcttatggcagggtttgctggtgaaagactgatttgcctaatatctgctcatccaggacaagtgcacccagcgaccaatgctttcaaggaatggattcattcctatgaatactaaattgcttagagccattttgcctacaatgttttcacttaatgactagttatcttaaaactaaaaaatacatttctaaattaaggatgtttttagtcagttgacaaagggctcttatgaaaattagcaatttatttattgaggattatttttcctaaaaagttgcaacattttaattagccagccatggtagcacgtgcctgtaatcccagctgctcgggaggctgaggcaggagaatcagtggaacccgggaggtggaggttgcagtgagccaagattgcgccactgcgctccagcctgggcgacagagcaagactccgtctcaaaaaaaaaaaagttgcaacattttatacagtatcaaaatcgtccatttgaaatatttttactttcttaattataatgattaccacttgtttagtgttgattatgtgcctagccttgagagagttttctttctgaggcataatttagtttaatcctcacaaaagcctgatggtgtagacagaggagataatcaaacaatggttcaacttgcatactgaccagttagaatagatacaggccaactcttgcactgacacctttgtgaattgctgaacatcgtttggaggttttacaaattttttattcatgtttcccaacaccaaatacatcatgtcttcgccagtaccaaccagtcattcaacactgataccaactgggtgtccaacagttcaattcagttctgacactgactaccggaagttagcacatgggtttaagggctgagctccccaacaccgtcctcacttcagatgccagttacaagtattgggtccccaggttacctacactctgtctgacatggctacaacattgggggttcccacaaccccccttttaggtgcaacaacttgctagaactcaggaaaacgctatgctcttatgattacagtttattattaagcatatgaatgaacaaccagatgaagaggtgcacagggcaaggtctggaaggattccaagtacaggagcctctgcccttttttttttttttttttttttgtgagatggagtctcgctctgttgcccaggctggagtgcagtggcacgatctcggctcactgcaacctcctcctcccgggttcacgccattctcctgcctcagcctcctgagcagctgggactacaggcgtccaccaccacgcccggctaatcttttgtattttcagtagagatggggtttcaccgtgttaaccaggatggtctcgatctcctgacctcgtgatccaccctcctcggcctcccaaggtgctgggattacaggcgtgagccaccgcgcctggccgcctctgtccctttagcattgggttgcaccacactcttcataccaatatgctcaccagcccagaagctgtcctaaccccgtcagggtattttatggagattttgttacataggcaggattgattaaatcactggccactggggatcaactcaatttctagctcctctcctctcctgagaggttgggaaatggggctgaaggttctgagcatctaatcaagactcactctttcttgcaattagcccccatcctgaagctatctagggactcaccaacctgctgccttcttagaacaaaagatgctcccatcacttgggaaattcccagagttttaggagctccatgccagaaacgagagacaagggcaaatggagttcttattatactacagtaatattatcctcattgtgcaaatgtgtaactaaggctcttggaggataaagtgatcatttataggtttccaaggagtaagtggcagatctgatttccatccctcatctggctctgcactgtgctcatatcgagcactgcccccagcccagcgtcctgcctatgccttctaggccccattcctgccctccccagctgaacccatccccattccaggacatgccccaggtgctggggcacccagagtgcctttccaaacttgactgagcatcttttgggctgcaccagcctgtttcctggagttcatcttcttgggaagatcttgtgtgtgtttccctgggtctgaaagatgagcagggagcattgctgaatggagtgtggccatgtggatcgggatgtccacgtgactatatgcatcccctaacccgcagaacacaattgggtttgagaagagaggaggggtagggtcgaggggtctcaaacttccatctattttcttgcaccagccctgcaaatatttaggccttctcttaaccattttgcaatactgcctccataattacaaaatgcttattttcccttctaccttgggtaccagtccatcttttttatgtggttagagcttacgtaattcaaatcaagtttgtttctatttagtaagacattggcattttgaaaacaaaaacaaagaagtgacacaagtagaattctgttattgttaaggccttttttgtttctttaagatacccaataataaaatatagctgggtcatgaaacacaaaatcatatggaagtatataccttagcaaatgagtttattgcaagaaacaagtattaaagaaatgattttcaatcaacatagagtgaagttctgcaagggttcaaaggcaggtaaaatagaaaataaaaaggttcctacagtgacatgaaactatcaccaactactaaaaatttttagtatggttttagtttgtttggttaccaactactacatatttgagaaatgaccattaggaacacaaaagtaaattagaagtactctttaaaaaatccataaaatacctctgaaatggtaaaaaagaacaggcactcaaatggctgcaaaaagagtcagagagggccaggtgtggtggctcacgcctgtaatcccagcactttgggaggccaacgtgggtggatcacgaggtcaggagatcgagaccatctggccgacacggtgaaaccccgtctctactaaaaatacaaaaaattagccgggcgtggtggctcacgcctgtaatcccagtgctttgggaggccgaggcgggtggatcaagaggtcaggagatcgataccatcctggctaacacggtgaaatcccgtctctactaaaaatacaaaaaattagccaggcgtggtggtgggcggctgtagtcccagctacttgggaggctgaggcaggagaatggtgtgaacccgggaggcagaggttgcagtgagccgagatcgtaccactgcactccagcctgggcaacagagagagactccgtctcaaaaaaaaaaaaagagtcagagatccgtgtgggttgaggaggcaggggagggtggttgagcttttattctcctggtctttaggtccgttgggttttcgctgagctggtgtggagggtggcagtgccatcacgctgcgtgctgagtgaatccctttggtgtgtgatcactctggtggtggcggtgtgagaagctcatacgcccttggtctctaatgtggcagagctgggagaaacttaggttccctgcttcatgcctttcaccctctttcctccagtcctcatgcttcttgttcatcaaggctccttggtggcaccctcttgtctctgcatgaatcagctctctctttcctctaggtatatccacacgcctcactgggcacctccactaactgcctgctctcaggactgaccgcttcatatctgtatgaaacagatctgtttcccatctcgatccctcaaggatcaggactgtgttgcatctggaatctctatctattcccttccctgtcattttatacttgatgcaacctgagtactcaaaacttccccataagaaacaagagactcaaacagttgctcatttagtttatgtcttggttggttacagaccgagtggctgctgtaacttctatgatgttgctgcggtcttggatatccaaggatgttttgatttttggaatccaggggaggctggcagggcatcatgtgaagtgagaattcagttgctcctgggaagggctctgggaatcccatggaggcttctggtggaggtttcttggttatccttcagtttccaaacccattttgagggcaggattagggtttgagatcatgtctcgtaggtgagtggaaatattatgtctctgtgttgggatgaagtggcttcctttgaaatgccctgtttgagtctccttttatcactggctagaaaaattttaacgaagatctcggtaatctgattgtacattgcaaagtgtatgtcagtaatctattgtcacaaaaatgctgtgtaacaaattccccaaatttcagtggcttcaagcagtaagcacttattcagccatgagcctgtgggttggccattctggttggacttggctagcggctggtctggttgcctccctcccatgtctggggttttggttgtctatgggatgatcaaacgtagtcttggtggggtgattggggtgggtgactctgcctcaggtacctctcatcctcccgcatgcatctggccatgttcccatgctggtggaaagttacagaaaagcaaaggggaacatgtcctgcctcctgaggcttcagctaggatctgtcatacttgtctttctgctactgcctgttggctgaagcagatcatataggccgcccaaaaataagggttgggaagtaattctacctctttaatgggaagaatcacaaagttatgtggcaaaaagcatgggtacaggaggagttgagtgttggaaccatctttgtacttatccatagtgacagtgaaacaagctatttaccctctatcttctccgtgcctctagagcacttacagggtgtttcaatgacctgtgtgtgtaataaactaccccaaatcctagcagcttagtacaacaacccatttattattggtcatgattctgtgggctgactggactcagctggaagctgcctccctgatgtcggcaggggccgtggtcatctgagagtcagttctctggactgtccaggacaactccctcccgggcctggcgttggtgctggctgccccactgggcactcggtcctctgccatgtgctgtgctgctgagggtatggggacttggtttcaggaggcaggaaggggaagctcccacttccataaaggcctgagcctgggactcctgaaaccttccctctgctgtgttctgcaggtcagaggcagccacaggtcagcctgggtttgaggggagggggacgagcttcagtccctggtgtgagcgtcagcatgtgtgtgcaggcagggaggaactgtgcggagtgaactagtccagagagaatgtccagacatacggaaatagccatgtgctccccagagcagggttgtgcagtgggacgccctccctttgtgaggatggcttgcagacgctccccttccgggctgaatgaccccaggagcagagtggtgttttcctgtggcacctgctgctcttaggataaggggagttgaggattcctatgctcccagaaaccttcagccaggccccatcctctcccagcctcttctcccacgagagcaccaggagcctggtcaccttcatctgcttcccggttcaatttcaggactgcacttcactccctctgtactttcagtaactctcatcccccagagggactttaggcctgggggtgggggtggggggaagtacatattttccaagacctagaaatttggttatagaaaaaaaatgcctaaggttcccagcatgtcatcttcttggtgagccaagctccgccaatcttgggaggcctccagggagactgaagacagatgtggagcatgcagatctggaggtagatgctcttcatgagaggcaattgggttggaatgggtgtgcctgtaccgtgagaggtcagaaaggacagatgtgaatgtggggaggactcctgtgaatgctttcacttgtcactacagtaatgcgctcagtagcaaatttgaaagacagccttcgaaaatgtctcaagttctgtaatcatattgtttatttttattttgcatttgttactgcaaagagccattgtaaaggagaaaacaaacaaaaaactacaggtgataaaaagcaagtgatggcttctaaaaatgtaaactaaaaaaggcatttttagtgccaaaaaagaactgatggcttggctgagatctgcagagcaccagagactggctggggaccaggtactggaggctggagcctggaaggaggggccccatgacgggagaggtccccctagaatccagctgcagtcagaaccataaccaagcgcccagggaggttgggcggcaggtgtcggtggtgggaaggtgaggggaagagatacccctctcctctcacccctgctctccagagggggccacgtcaaccaaccctgacaggtggccaggaggcaaggcaccctgctgagcccatctgtagaggtcagccctggggcctgtgacagcaaagggaggttggagactggctcggtggaaggggagggcacagacagtggtcagaacatgctgctttataatttgaataaaggaatatattggatgaagtatttatttctggaaaattcctggattataggcatctttaaatttaatttatttaagcggtgttttaaaatgtcccttcaaaatgtgggttgatacctgctaattaagtcaaaccaaattttttttgggctctggagtcagatagcctaatctgatttgaagtttggttctgtcgcttattaaccaggtgatcctggacaaatcagtaacctttatgagtcttgacgtccacagctggacaatgggaatgacagctctcagagtcgtggttggaatgaaatgagaaaatgtgtgtggagcccttagcgctcaaggaactggcgctgaagtactcaatgaatggtagctgtgctgtttactaagaacttaataacaaagctgaaaaggatgtgcagatcgcatgagttttggtgggatttcaaagtcctgttttctcagtatgatagagaagtatgccctgttttagtcccacgtcttcctttaatggatccctcattagatgctgcccacgtggaaggatgtgtggatgctgcatgtgatgtgggttagcttgagctagattcttctgtcctgtcggactagggttctcttgggctcattgtaagtgattttcccaatggaagggaagtgagttatctagtcacctcatggaccacacgtacctagaggatgcctttaggcaaacatgtttaatgtaaagctatgattcttttgccattggtgaattgtgtcctgtcctgctagaacataaaacacagaaatgcagttgtttattattatgtatgttgttccttttgtcttctagccgtcaggttctgaacagctggtagatgggctggcttactgaaggacatgattcagactgtcccggacccagcagctcatatcaaggtaagtcccgtcttggctgggaagccagctctgccttcctctgtgcctaggttttcatggatagcagcccacatatcagttaattaggggtcagtcaacacagcccaggagctaagaaaatggtttttacttttttaaatggttgaaaaatcaaaagaagcatatttcgtaacacatgtaaattgcatgaaatttacatttcagtgtccataaagaaagctttattggaacacagccccatgcattcatttctatatcatctgtggctgccttcactccataatggcacagttgagtaggttcgacaaagaccatatggcctgccagctgaaaatatttactgtctggaccttttcagaaaaaattttgctgagttaatatatgaaatcacatccaaattcttctaactcctgttataattccatctcctttatacttgcctggggttagcgagcaggagacaagtaggtgaatgattggatttccgatgttggaacgttgttttatctgggctcgccgacactcagcgctccatcacctcacacctgccctggctgctttctgacctgcacttcctgaggctctggaggtgagagggtgaggaagtgcgacttgtgccaagggaggtccctgagaggactctggccatttattttgacactacacatacatgtgggtaatagctacagggaggaaatgagatggtagttttcatatatttgacaaaaataaagactgcagaaaaaattggggcttaagctaccttatccaaacaggctgtctacacctgtgctggttagttcaactatatctatgctggccaaagtaattgactgcatggccagttcttcactttccccatactaattcattttccctaagtggtgtggttggttttactaatgtatattccttgcctaaaacattaattgaaaatgggaagggcttataattgaaagcaaagtttgtgatattgaaaagtgtacctttttgaataaaatataaaaagcctttcaaaatcccacacatacaattacacatggacgtacacacattttaaaacaatacatttggtgaggcattctggaccatgtgcagctcacatacacacacatttactttttttgaaaatggaattggaagtaataagagtttcaatgcattccttgagctttgtgggtgctccttcactttcagagattgtggtaactctagggatgtcgaggattctaaattttgcccaaggccatagaggagcagatgcttatggggacactataatttgatttctgtgtgatgttttgttgggctatgatggttgtgtttatcaaaaaaagtgcaagtaggaaatctcttgtggatgtgataaggtttcttcggaagtgctgggaacatatttgatcagtgtgtctgtgctacacaagtaaagtgggagaaagactttctttaatttttagtgtctgctgaccatgaagctgcatgatgcaaagaaaagctcatagggaagttgagacaataaatatcttctatagttcagattgtgagggacggcaactgaaattcattttattagcattccacaccacccctccaggcaaccagaaggaaatgatgaagtcagcaagaaagtattacaggttttaaaaagctaattcataaaggtgaaacaatcccatacaaacctgaaaacaccatctttgaaaatgtgtgttggtagaaacgttctatatttgatttcaggaatgaactatgttttcggctctgatttatcttattatctgaaggggtgaccttcccctccacaactgtgggtatttctagtcaggtgggacgagagactgagaaaagaaataagacacagagacaaagtatagagaaacaacagtgggctcaggggaccggcgctcagcataccaaggacctgcaccggcaccggcctctgagttccctcagttttaattgattattattttcattattttagcaaaaaggaatgtagtaggagagcagggtgataataaggagaaggtcagcaaaaaacatgtgagcaaaagaatctatgtcataattaagttcaagggaaggtactatgcctggatgtgcacataggccagatgtatgtttctctccacccaaacatctcagcggagtaaagaataacaaagcagcattgctgtaaacatgtctcaccttccaccatagggcggtttttctctcatctcagaattgaacaaatgtacaattgggttttatactgagacattcagttcccaggggcagacaggagacagtggccttcctctatctcaactgcaagaggctttcctcttttactaatccacctcagcacagaccctttacgggtgtcgggctgggggacagtcaggtctttctcatcccacgaggccatatttcagactatcacatgggagaaaccttggacaataccccgctttcaagggcagaggtccctgcggctttccgcagtgcattgtgcccctggtttattgaggctagagaatggcgatgacttttaccaagtatactgcttgtaaacatgttaacaaggcacgtcctgcacagccctagatcccttacacattgattttatacaacacatgtttttgtgagctccaggttgggtcaaagtggctagggcaaagtggttggggcaaagctacaaattaacaacatctcagcaaagcaattgtttaaagtacaggtctttttcaaaatggagtctcttatgtctttcctttctacatagacacagtaacagtcagatctctctttcttttccctacaattatcatcatattggttgatcgtattggttaatgtcaatatataatatcatcatcatattggttgatgtcaatatatgaaatataattttgagaaatcataactgagagtttttaaaaaataaatttcaactcacatggcttctgtgtgtttggagagatgaactggcaataagaagtgtggttgctaatagctgatgttggctgcgaggtagaattgtgttaaagatatttatttcctttataaacctatcaaaatcccaccaattagaattcgaataattatttttgtaattcttttttctgcatatgaaattggggttcttgacaacaaagttgggaggataattttcttccactgattcattaaaatgcctgatatgggagtttttgaagtaaaatttcatgtgcgagaagtttcttctggctttgggctgaggaacgctgctatgatttctgggaaggaagttctttttttttttttttttttttgatggagtctcgctttgttgcccaggctggagtgcagtggcgcgatcttggcttgctgcaacctctgcctcctgggttcccgccattctcctgcctcagcctcctgagtagctgggactacaggcacctgccaccacgcctggctaattttttgcatttttttttttttttttagtagagacggggtttcaccgtgttagccaggatggtctcaatctcctgacctcgtgatccacctgccttggcctcccaaagtgctgggattacaggcgtgagccaccgcacctggccggaaggaagttcttataaatggcacatgaatggttccttttgatgtattaacatatatagtggaagattttgtttttggttcattgctactaaaatgtttttgttatctgagaaggacttgagttttccacagaagtggcttaacactgcaggtgtgattcccgtgaagactctgtgtcatcacagtcctgtccgtaggctgtcctggaggagaggaacattcctttcatcttagagaaattcactctgcaaaatttatgatgactcttttctgccagaacaaatggcttttatccttttatatgtttaaggagctggaaacaataaaaaaaggaggggtggttgaaaactatggaatataaaatattcttgatttaaatagtgcaagaattgtggcaattcatttacaaacaaaatgagcaggctgtttattttagctgcttctctgtcagtgataatagtgactgtcttgaagcataatttgatttccctttctttgcaggccgttccaggtaccttttttaaaaattttttatttattatttatttttatttattttttttaagacatagtcttgctctgttgcccaggctggagtgcagtggtatgattatggctcactgcagcctctgcctcccaggctcaagcgatcttcctgcctcaacctcctgagtagctgggactacaggtgtgcaccgctacacccagctaatttttattttttttgtagagacaaggtctcactatcttgcccaggctggtctcaaactctgggctcaagcaatcctcccacctcagcctcccaaaatgctgggattacaggcatgaccaagtactttttttattacagaaattatactaactaccatatcatgcacatctactcttagcatgttaggtgtgtatgaagatacaactctctgaaggggtggagctgtcacaaccaaagatgcacccagatgattatcatcagccgacaaaaaaaatagcaaatccattttcttaggatcctataaatatttttgtcattaattctatttctgataaagcatttttaaattcacatgattgcatttcctaaaaagagttctgtctctataatattttcatttactaacatttgctgaagaggactaactaattgcctttgttgttcaccagctaatcatatagaataatacacattttggagccgatggaatgaggactggactgagaggggaaccatctgtatattagttctgctccgtggtcgccagctgtgaatcccagagatgctagtcatgaaaattctctgagctttgcattcttatccagtttcatgtcgtggataagaacacattctggctcaattcaaatcctgctctgatgtttactaacttggtgattttgtacaagttccttagtttctttgtgccttggtctcattttatatgaaacggaagcatctgttttgcagggttcgtgggagattaaacgagttagtacatttagaccccactgagtactaaacaattgtgagctatcactgtgatctataaaatgagggtggcgtacccatcttaaagataaaacatcatcctgtctctgatacctatggagcaacatgagcatgttttacaaaacactgagtggagtgaaaaatacagaaaacagaacgcgctttgtagcacatgctacttacatacataaaaaagttatatactcctcaagcaacatcacagggttttccagggtacatacatacctaaccatatagatcacattggagtgggtgcttgcctgtgtggcacatgctggctagttgctttgagaagtggttggggataagggaaaaaataatcatatgcaaataaaacaagttaataacagtgatgtttttatgtggcacagtgggtcctccatgctggcaggagcatgagtttgtacaagcacttttgtattggcttggtgttacctagtaaagctgaagatgtgcctagcctgtgatccagcagtctcaccctgggtctgtattcccttgtacctgagcaccaggaggtatgtatgagcaaaaacagaacaacccaagtgtccatctacagaaaagtggatacataaacctattgtactccaccaatggagtactatacagcagtgaaaaataaactccaagtgtctatctgtagccatgtatcagtgtggatggttctcatatgtgagtagaaaaaagtcacagattacatacaatatgattccacaaataaagattaaaaagaggcaacattaaaaagcatattattcagagaaacgtaatatgtgttgaaaagaaaaataaggaaaaaaaaccacataactcagcattggaattaccttgtcagggaggggagagttttaggggaaaggcataaggggcttctgaggtcctggggctgactgttgtggactagggagtacctgcaaaggtgtttgcttcttattctttaaattgcacaaatagattatatatcctgttttgtgtgtactatttgcaacaaaaataccaaaagaagagagaggaaaaattaggtggctcatagtgaagtcagtcttgagaggaaggtactttctagttgtaaaactcattgtactttagcaaatcatcacattagagatcacttggtctgatgctgttctagctgcaaggaaaggtgggagctactgctggtcaagtgacttccttgaagctcaggctgtgcctgttccaaagctgggcacgggccgtttccaagttgagtgtgtcctcctgccttggctttgtgagtttttccaccgcacccttttgcgatgaggaatgatttggagactgcttctgacttgggctcgtttattcattcaacaaacatttagcaaaccttccatgtaccccactgggggtggggggggagggagagaagggatcaaaaagacacagcatctgccactcagggcatgggtcacctgttctcaaacacttcgggcacagcgaagctgctagagagggacaggggagctgctgctggggtctgggcaggatctcaggggggctgcctgtagtctgcaccttcacctgctccactggctcaccccctatcacccctgtgtcctgccgacagcatctatgttcagcagccgctgcttctgcctgtaagcctcctggcagaggatcttcctgggatcacaccttgctgtctcttccaggtgaagcaggcaggtgaccctcgggtgcttgatgaggctgggggttcataggtccactcacctgtagcaggcgagtacagatgcctgaagttggaccctccatcgacacgtcctctgtcctccagctcatgaagggtgtccaggctcaattcagctaagctaatcactagatactgctccgtaagattttgtgtgaggatcaggcaccaacaatggatgacaggggaaacaaagtcactgttcaggtttctagttgctgttcacatgtggggaaggactaaaaacccagcttacccaggatttgtttgtaattaggattttcaccccttggcttccttttccctttggcttttatacttttgctcatttttatgagtgtgctggggccagatgatctcagtgtgaagcttggctccacctgttactagctgcctcagtttcctcagctgtaaaatgggaatgaaatagtgcatctaccccatagaatcacgaggaataaattagctaatgagtttagagcattcaaagcggtgcctggcactcagtgagacttattatcacatcacattacgtattgtcaatataataatatgcacaccatgttaattatataacattaatatttttaaacaatatagcatattattaatctataatgttgtatactagcatactggtgcatatagcagtggaaggggagatactgttacatatagcagtggaaggggagatactgttacatatagcagtggaaggagaaaagtaagaaggggaaatcttacggaaaaaattaaattgacccagggtcagtacttcccaagaagtgaactgaagcacttctttcccacattgttccacggctgccgctctggaagtaacgctaaatatttctgaccataaaagacgctaaacttaaactctgtgtctgtttcatagacggaagagtctaaaacagtttcagaagtagcagcgttctgtgcgaggtcactgtgaagcctgagagcccagcagatgagccgagctcttttcaataacacgaagcagatgcagaaagcgcccgaatctgccttgcgaggaagggattaggcgatgtctcggggctggtgatgatttatcccatcgctatggcgaagggtggatttcacgatggagcccccactggctgacaaaagactcattgagttgtaagcatttctcacagtttgcaaatctgatttatagtaactgtgcttcacaggaaggtgaaagtttatccttttgagaatatactcaaaagagacagagttcccccgcccccaaagtctgtctactatgaagctgatgtaagtctttgatatgctgcctattttttctcaataaatcagctttgatcagtttccagcctggttagcacatcccgatgagccctgtgactttgtggccgtgtatagctgctttttcgttttttgtactttcatttttctgcaggatgatggcacaattaaaatttctacaatgagtacttttataatcagaaaaataatattgctttaaaatatcaagatatttaatatggcacaataatagagaccctgcctacagatttctttatgtgcgtggtctcgagctggactgtaccttctgtttctccttctcactgggttcctgcacccctcagggtcgccatgctgggcaccctccagggccagattccaatgcggtgctcagttcctgtagcctttggaacggtgttcagcatgtgtgcagcagggtttagtgaagtagtgaagtgttccccagacatgctgcacaatcccccccccagtctggcgattcctcgttaagattcagtgaggctgacattcagtagggggcaccaacttaatcaggaagtgtaagaggggtttggaggagattcacaatcacttcccaggagaatgggtggaagttgcgcatggttagcctagaccccctctggggcagtttccctgaggagttggttaaaatgcagattcctggtatctaaagcttcttctccagtaagtttgggttggagcccaggatgctgcagttcaagcacctgaagtgtttctgcgtatcttgctcagataattgatagttatcaacaattaacctagccttagataatcgataaatatttataaaaggaaccatgttttttgtttctttgtttcttcattgaaggctgctgtcttttgcgtggcttctgtgaatatcctagtcacacctctaagggtttagagagcattatttggccttgggtttcaaaacatcagcaagtctcttcggctccactatttggtgtcatagagcccagaagagaagtgacacttgttgcttcttccaccttataggaaattaacttaggaatcggagtcaataattttgcttagggttagcccccagtagttgagtgttttagagacatcagcaaggttggcatcactgtctctgacttagccctgtctgtgcaattgggggttgaggatcattatcctcgttgtaggactcagtgtggggccactgttgtgggggaagcaggaattggagggtacagtggttcaggacactaaattagcattttcccatggggacacccaactctttcttactaatgaataggaagaagtcctacttattatgggtttttgctggtttaatcttcaccttcttttccttctgtgtcttctttaccttctgatcgcaaaatcccatggtgtattggtatgaaagaatgatcattgataccagatcacccaattctgcccatctatacttctccaggaagtatctgagagcactattttatcacattctattgtggtttttaatctttgctgatttgatgggtgacaatggagttttatagatgttagcacttggaaacttgtgagcttgatcatctcttcatactcttcacacacttatcaacaagttacgttatctcatttgtgatatttttggatccaatttcaatctaatcattcagaattgctgggctacagcatgaactgaacagatgatgtccccgcctgcatgaagcttccattcccgtggctgagatagaatgtgctcaagggaatagttacaaatcaggtggtgctggttggtattctccagaacaaagcaggagaagcaagagactgaggaagggagaggtagaattttacacgaaaggttagggaaggtcatagggaggaggtgacattcaagctgagacccgaagggagtgggagcatgagccgtatgatcacacggggaagagtattgcagagagagggaacagcatgtgcaaaggccctttggcaggagctctcctggcactttcaagtaacggcaaggagactgggggctggcgtggagtgaggttaaagctgcaggatgtgagttggaggcatgctggtgaggctgtgttgtagacttctgttaagcaaggataagggcatttccattttatttggcacactgcgggaggagaaccattggaaggttcatagcagatgtgatctgattgaattttttaaagctttcttgaagtataatttacattggttgaagttctaaaagaaccatgttggctgttgtgtggggaacagtctagagggggaccaagagttgaaacagggaagaccaattaggaggccattgccaggcaccaggcagcgaaaggggaggtagtgagaaatgatcagactggggatctactttgaaggtggaaaagacagcatttgctgatggattagatatgcagtgtaggagagtcaaggatgactttaaagattttgtttgtaactgggtatatgatggtgccacctactctaaaagggacatctgcaagaggggacagttgcaatgagcaggaagtcaaaagtggggtttggctgtgttgagttggagatgcctgttggatatccaaattgtgatgttgagaggttgatatgagtctagaggtcatgtgagagatatatttgtgattcctaagcctaaggctatctgaggctgggtgactaggtgagatcacctagggaccaagatgcagaagagcattagggttgagctttgggcccctccaatgcatacaggttggaaagaggagggggaactacagaggagctgagaagagaagccagtggaggtaggagaagggctaagaaactgctgtctcggtgagatgaggactgaggattagccacaggctttggccacctggacatcattgtgaccttcatatgagtgatttgcatgggtggacaaaagccaccttgcagtgaatatgaacaaaaaaaaagagagagagagaagaagtgcagacagcttatatgcaaacaactcttttgacatgatttagaaggtgtagtgagtttctcagcaatttgtatacattatattttaatgatagttcccctcagctatgtaatatttgttgtgcagattgtttttgatgattattctacctattaatttttatgatgttccttttccaacaccccatgagataaacatttttctttgatcacatcaattgataattctttttatttttcccttagcttttaacttagaaaattttatctattttattcttctttttacttctgtgtatttaccagtattctgtatagcttgtttaatagatataaaagaaagtacatcttatcgtaaaacccaccgacaaagtcattcagcattcacaggagataaggcttgtggcatccaattcagtttccttcatcaggatttctgggttctgtgcaaaatgaacacagcatcactttgcagcagtttttttttttctcttagtcccctctgcagggttgataataaaaatagttgataattagcatggacacagtaattggaaaggggcataaaccaatcagaaaagattacaattgggagcaacaggtgtccctgtcacgttgtacaccactctctcccgataccttactcgcgagtgaattggatttctggctccatgcctttctggccttctgaattttgcctctctgtcctcggatccttgctatttgtctccttgccattttggggaaaaaggaggcatttactatgtaaggattatctgtgtgcctgttttatatgtttgctagattataaattacttgaagtgatcacataatcatttttgcatcctgcattatacgttatgtatgtagcacatgcttcacatatacgagttgactgaattgaataagcaatggcaacaatgaaacaagagtgattcagggactttgttgtattctggggcagaattgaacatgtcggtattcacttactctttattttctctcctttctaggtatgattgtaaccatacaaccaatttatagcagagaggacgtgctctcacggaccatgtgtctgcgctttcatagatacctacagactttattttttagagcagttttaggttcacaacagacttgagcatataccacaagtgttctcatataattcctgcccctatacatacatagcttccaccactatcaacattttcccacatgggtggctgacgtgtaacaagggctgaacctacatcaacacatcattatcacccaaagtccagagttctcattagggttatactttaatataaacaccgtatacccttggtgttatatgttctgtgggtttggacaaacaggtgatgacacggatccaccattataatatcatacagattagtttcactgcccctcaaattcactgagctgtgtctgttcatccctcccgacctcctaggccctgacaaccactgatctttttacatctccatagttttgccatttccagactgtcatatggttggaatcatacactatgtagccttttcagattttcttatctggtatagtaatgtgcatttaagcttcctcctcgtcttttcatggcttagtagctcttcttaactttttaaaccataaaactcttttaaaattaggtgaatactatatattttctcccaggaataagaacaaacacgcacacttttatatgctcatggatctattgcagtcaattcagtacctcccctcaacccacctcccacactctcggtcctgcaggagctgggataccaggtcagccagtccctgcaacctcttgaagcagttgatgaaattgaaagtgaatttttctttgcacctatcttgctagaaactgtgttgctccttgagctcagtaggatagaagttctttgaacaaagacagtttaagaggtgcattatcgatttaaatgtagttcagatcacagatactcattctgtacttttgcatgcaggaggacggcttctcaaactttaatacatccataagtcacctggggaccttgctaagagcagatcctagttcagtaggtctagggcaggccttgagattgtgcgccacaaactacccccaggtgctgctggttctgctggcctgaggaccagcctctttaaagccaggctggaaagccctgttttccaaactacaggtcatgacccatttgtctaagtgagtcaaggccagtattaacaaaaggaaatgggatggagtaaagtggaaactatcagggcacatcacatacagaaagaaaaagtattatttttgaagattttgttttagttatatatgtgcgtgtatgtatgcatgtgtatatatatataatatctacacactgagttttataataatctacattagtttgtactctggatacattctgtgtagcaagaaacaagggtagatgcactacgttggtttcgttctaaataatagtgagcttgcaggcataaaattgcacatgtgtctccgtggattttgctgctcagattctggtatccagatgttgggattttaaccaaggctgtaaatagcagagaaagtttttttattattttaaagatcaaattccaaaattctggttgtgttttacttaattgagagtacatgttacttctgagaatgtactttaaaaagtaaacaaatttaactgaagcatggctattagttagtgattctttgtagattttctggaaagtcttgtttgtttgtattaaacattaactctgctgtatgctgtaaatacactgctaagatcaatattgaaaaacgaacaataataccaattcatatggaccttcaaattagtcttataaaattttatgatatggtattatccagccaactgactttgagactgacaaaatatctaactttaaccaggtgattcttgcattctttgttttaaaacctcaagtttaaaatatctttatatttacatttaattgtcattaatcaaaaatatatgcctaaagtaacagtcaaaaacaagtcaattttttctgacttgtgttgtttgaaaaagcccccagttcaaatatttactttctgttattgtttgaaaaaaaaaaaaaaaggattgtgtagaatttacccatttcattgtgtgttacaaaagtgacctagagcctgcaggtgtgacaaggggtgttgggtcatctccttacctgtccaatttcaccttcagggcacaatgtcctgcaagaattatatataaaatagacaatgttggcaatgagcaaagacatcaggaaagaaaacagaccaagagggagaagatatttttacctgtgaatcatttaaacaatatgctgctgttcctgttcctcagtcttttatgataatggaaaactaacatatatccaataaaaggatttagaaagacctgttacttgattcctcaaacctgaaattaaaaacaaacgaacaacataacccttaggttaggtaaaacataccatgtgaagaaatgtggctctgaataagaaaaaaaagacattaaaaaaaaccccacattttatagtattaaaaagtatgtgttagaaaaccttttgattgatattaatgcatgacataaatcaactgaaggacttattattcttgcatcaattaaaagcatttagacttacctgaaaatctgaaagtagcatgttacatacaaccctaattattgtgtgccctcatgtaaacagcaacatttgatgatcagttcactccatgaggaccacaatttgggaagctttctcatttcctttgaaatggctaaatagcgtcatgggtaattggaattatattaaattttattttccagaaaatgagtcttcatgtaggggcttggaaagtcactttttgctggtattggttttaggagtattgtgttagttaggttccctgggaagcagatgttgagacggaattaggaatgttagtgttttattggagggggaagggggctgtgcctgtgaaggataaaatgaggatgaagcaagactgggcagggagagcctcagaccaggtacagatttgatagtttgaccaacccaacggggaggtctggagcagagcttgcctttggaggggccccgggttgggcagaaatgaccaggctctagtaccctgctgtgtcagtgattggctcagggctgtctgggatgaggcagggcctgaggtgtgaacagctggaggttgttcagatgcatgctagattctttcttgaagggagatcctagtgggacacctctggggctgccatagcatctgtagaagcaggaaagggatgtagctggttccttctgaagctccagcagggttatcatttgcttgacattgtcaccctccttgtccttttttgttgttgttgcaaatttcccttttgcaagactactttctgctcagaactaaatgcccttcactcacaaaatctgtataattttcatgacctaaaatggcttctgtcctgagtgcttagatggggtcatttgctgttggacagtcccactactgtcaagtgccaccatgatgggaaattgtaatgttaaagaaaagatgaggccgggtgtggtgtctcacgcctataatcccagcactttgggagaccaaggtgggtggatcacctgaggtcaggagttcgaggccagcctgaccaacatggtgaaaccccatctctactaaaaatacaaaaaaattagctgggcgtggtggcgcatgcctgtaatcccagctacttgggagactgaggcaggaaatcacttgaacccgggaggcagggggtgcagtgagccaagaccgtgccatggcactccagcctgggcaacaagagcgaaactctgtctcaagaaaaaaaaatgattattaaaaaatttgttttagattaattttattgttggatgtttcttgggcttagacctttagataaaccattttgactctatttgttatattacctgcctctactgttatttaaggttgacgttaaatttctttcagtgattttgttaaagtctgtcatcagttagttagacctgaaatctaaatgactaaatcgtgctggccattatatcaacctttgtcctctaaaaatttgggtcccagagttggtctttaattctgcctggggctccatctcaaaaaaaaaaaaaaaaaaaaaaagggaaatgggatccatggagaaggatctattattttttttaccaagtccattgctgccaagtggaaagaaccccctcagaatgggtcatcagcaggcaggtgtgttccaggctctgcaattctcccactccaacctcctgcttctgacagatttaaggatttttggaccagaaaaaaaagtactttgggaggatcctcctatggatttccttgttctgctcctgatctctctgtgccagcccatcagctaggattcatggagcaaggtctgtggcttcaatgctgggtgctcttttgctttcattgtggggtactcacagacaccctccagcctgaggcaccggttctgccctgtgcatgcaaaagagactgtgtctccatatcgccatcacttcccctctcctttcttgctattgttctctttatattcaaattatgtagttggtacttttaatgttattttacatttccttgcaccttgatgaaagacattgtgtatttctcacctttttctgtgctgattttttatctgctcacaaatattgcctttatgactccatttctcttaaatgtggcttttaagtgtttttggttcatttgtggaaatcatttactcttccctcaatttgcgctgtaactgtcacctccgtgtgttaagtaaatcggggagatttctttatttctacatttggctttccttattgatacgtgataggaaagaaagtaattcccaaggaagactatcccagtattgtaggaatgttgtggcaacattaagccccactccatcttgcatttccatacttttgccatttactattcaaagatttggagactgatggaaaactatttcttgtttgaggcacacacactaatgtttgactttggatgagaaatttttgaatgtccttggaaaagtagaatgctgacaaggaccttgagagaagggactgtgattcaccctgtcttaaagaatgaaacttaaaactattaccaatataatttgtaccaataatagtactcatcttcttattactttaatctcctattcagtttaaagtttcttgctaaccccagtgttgacctgtttcaggctgggaaatctcagtttggacagaaggtgtggttggtcccctttctccatggtacatgtccatttctcctgctgtcatctccttgcctcttctgtgcccttgaaatcaatgatgagttgagtgaggttcaccagaccaggtttggggccaccctcagcagattctgccttaatagtctggtacctcttttttagaatgaggtctctgccaaaactgtaggacccccccccaaaacttagcatcctgatttagatcaaagaaaaaaagcaaaagatgataaaattaaatataaaatgccagttgccataggatatataaaatgataaaatagttccaaatcataagtaatttttaaaaagttttgttcattagttgaagtgcagggagaacactttgtacatcttcctaatctcagctaattctgcatctttaggagcaagaagaagggttaatatgcaggtgatgctggggtgcccatcttcatagaacagatgcccccaaagtcatacccagaacattctaagagtcttttgagaaatccagggaaatcatccacagaacacatggttttccccatgtggttaggattttatctttacctttaagaggttttacatctaaattgtcactcttattctcattggttaacgttctcagagtataatgccaagacgtctaaattgttaaaaacttaaccttttaaaaaaacatacacatatattagttttttttcaagctaatatatgtttgatcattgatcctcagagattcctacaaacctcaggttggtcccagaagtccgggggatgtcttctaaaagtgggtgacacaaagacttatgacttgcagcctagagaagcactgtctgagtgaagcccaggggccaactgtgtagcttctcagctgctctatgtcctggatctttccattttattctaaaatagtatattgcaatattgaaattcaatatggaaatatttccttgtggctttaaataaacttttcaggaatgcatattagcaactaaaaatagagaaagtctcaaatttctccacttttccaaagctattctggagatttaacacttttcttagcactctgaaggatagaacccatgatatcagtggcacaaggtcacagaaacatttagaactttctcttcctgagtacacatagctttggagtagctgaatacatgtgctttgtgagttcagtggagagtcccacaaaacacggtggaggtggcagaacctggaagacccagtaactctatgtgacggctactctagtggaagcctgagttctctattgggtaaccttggatgattgggttaggctctgctgagggtgctgggcagatgtgaggggctaccccagcgttaatcagggtaggctaatagctctaactctcaaatttcagtggtctaaacaaagtttatttctcactcctgtaacagtccagtatgggggtctgggtgcggtgggtctcctcagtagctctctgatgagaggagcaagagaaccctgctttcttcccatccagcctctacctagccttccccccactctgtgtcctcagaagcctttcttttcagccagtgggtgggagaagaatggaagattgcatgtagacctgtttcctaggccaggcttccatctacctttcattgaccaggaatgagtcacatgaccacacctggctgcaaaggaggctggtaaatatagtctgtctgggtaccaaggaggaaaagggatattggaaaggcttggcccaccccttttgtatccacaaaaggctgcagaaatgtgattggctcatatgccctatctcctcctatctccagagatgtgacttcttctctccttgggtgactacaaaataataatcttcttcattttttctcccatgacaaatcttgatgtcactgtgaacaacaatctaaaaaagtaaagattatatataataattatatgtaatctcaccaacccagatacaattaacattttaatcgttatatttccagtctatttttccatgaacaatattacatataattatttttgccaaaagaggtcatagtaactgctattttttcaattttttgaaactgcccttttatcatcccaaaatattgcatttctgcaatatggcatttttttttccatgtccctagaaactgtttagtgacctatgcaatttcatcctatgtatattctatacattttaagctaaatattttttgttggcttcagattcttggctgttatatacagggctatgttgaatatcctgtaactatctttgattaaatctatgataacttccttaggttctaatcatataagtagaatttctagaacaaagaatatgcaactgtccaaaatttttacatatatttccaatttcctttctgaagacttttaccagtttaagcacataccagtatatgacattacttgtttccccaatatctgccaatatttgttattgtatttttataatttgacagtacaaatagcaagaccttgataggtcacatttatttgcatttctttgattattaactttattagaagtgtactgatgatttatactttttcatgtccttagtccatttttccatgtggacttgaatttttcttctttatttcctcaaatgtgttgccagtgtcagacatagtgcatatttcaatatagatactcaataaaaacttgttaactgaacaaagaaaattatgttaaggatgtaacatataagttacatcctttatgttaaggatgttaaaactctgtcaaatgtgtttcatatattttctccagaaattgttgaaatttttctattaaataataatattgaaaatagaaaatttttgacaatggatatattatttttttactgagaaaaaaaccaaaactattttttatagtctttcaatatatagtttcttaattttttttttttgagacagagtctccctctgtcagccaggctggagtgcagtggcatgatctcagctcactgcagcctccgtctcccgggctcaagcaattctcctgcctcagcctcctgagtagctgggattacaggcgtgtgccaccatgcctggataatttttgtactttcagtagagacgaggtttcactatgttggccaggctggtctcaaactcctgacctcaggtaatccgcccgcctcagcatcccaaagtgctgggattacaggtgtgaaccactacccctggccagatttttaacatgtcatttaatttgttaacatttttttttgtgaattctttagttcatcctgacagaggctgttctcatcctaaattatataactattcatctgtattttctttctgtgttttatggtttaatttttaattaaatctaatctatttggattttttagatgtataatgtgagatagggatttagttttttttttttcctttctaacttttattttaggttcgggggtacacgtgtacgtttgttacgtgggtaaattgcatgccatgagagtttggtgtgcagattatttcataaaccatgtaataagcatagtgcccaattggtagtttttcaatcttcacccttcgtctaccctccaccctcaagcagcccctggtgtctatcattccattctttgtgtccatgtgtgctcagtgtttagctcccacttataagtgaaaacatgtggtatttggttttccgctcctgtgttaactcccttaggataatggcctccagctccattcatgttactgcaaaggacatgatttcattctattttatggctgtgtagtattctgtaatgtttgtgtaccacatttttttctttatccagtccaccactgatggacttctagattggttctatgtctttgctattgtgaataatgctgtgaataatgcaggtgtctttacagtagaacaatttatattcctttatatacccagtgatgggattattgggttgaatggtagttctattttaagttctttgggaaatctccaaactgctttccacagtgtctgaactaatttacattcacacacgcagcatataactgttcctttttctctgcagcctcaccaacatgtgttattttttgacttttaaaattgccgttctgactggtgtgtcatgatatctcatggtggttttggtttgcttttctctagtgattagtgatgttgagcgttttttcatatgcttgttggtcacacatgtcttcttttgagaagtgtcttttcatgtttttttggcccattttttttaaagaagttgttttttgcttgttaatttgcttaagtttttttttatagattctgcatattagacctttgttggatgcataatttgcaaatattttctcctattctgtacattgtctgtatactctattgatagtttcttttgctgtgcagaagctctttagtttaattaggtcccatttgtcaatttctgtttttgttgccattgcttttggagtctgtcatgaaatctttgccagggcctatgtccagaatggtatgttctaggttttcttctaggtttttatagttgtatgatttacatttaagtctttaatccatcttgagttgatttttgtatatggtaaaatgaaagagtctagtttcaatcttctgcatatggctagctagttatccaagcactatttattgaatagggaatcctttccacattgcttgttttgtctactttgttgaagattagatgactatagatgtgtgacattacttctgggttctctaatctagtccattggtttatgtgtctgtttttgtactagttctatgctgtcttggttactgtggccttatggcatagtttgaagctaggtagtgtgatacttcagctttttggtttcctagaattgctttggctatttaggctcttctgtggttccatatgaatttccaaatagttttttctaattctgtgaaaatgtaattagtaatatgatagaaatagcattgaatctataagttgctttgggaagtatggccattttaacaatattgattcttcctatccatgggcatggaatgtttttccatttctttgtgtcatctctgatttctttgatctttgttttgtaatacttgtcatagagattttcactccccagttatctgtacccttaagtattgtattttttttgttgctattttgaatggaattgcattcttgatatggctctcagcttggacattgttgatgtttagaaatgctactgatttttgtacattgattttgtatcctaaaacgttgtgaaattgtttttcagatccaggagtttttagacagatacaatgaggttttccagacataaatcacgtcctctgtgaagagagatagtttgacttcctctcttcccatttggatgtattttgtttcttttttttttttttctcttgcttgattgctctggctaggacttccagtactatattgactaagagtggtgagagtgggcatccttagcttgtttcaattctcatggggaatgcttccagcttttcctgttcagtacagtgttgctgtgggtttgtcatagatggctgttagtattttgaggtatgttctttcaatgcctagtttgtcagtgttttaaacatgaaaggatgttgaattttattggaagtcttttctgcagctattgagatgatcatgtggtttttgtgtttagttctgtttatgggatgaatcacatttattgatctgcatatgttgagccaaccttgcatcccaggaataatgtgtagttaatcatggtggattagctttttgatgtggtactggatttggtttactggtattttgttgaggatttccaaatccctgttcatcatgaatattggcctgaagtttcttttcttattgtgtctctgccaggtttctgtatcaaaatgatactggcctcataaaatgaggttaaggaggagtctttcctcctaaatcttttgtaatagtttcagtaggattggtagtagctctttgttatacatctggtagaatttggttgtgaatctctctggtctagggctttttctggttggtagtctttatattactgatttaattttgtaattcgttattggtctgttcagcgtttcaatttcagactttaaaccaacaatgatcaaaaaagacaaagaagggcattatataatgataaagggtccaattcaacaagaagacttaactgttctagatatgtatgcacccaatgctggagcactcagattcataaatcaagttttagggacctagtgagagacttagataaccatacaataatagtgggagatttcaacatctcactgacagtattagatagatcatcaaggcagaaaactaacttaacatatttgagacctaaacttgacacttgaccaaatggacctaacagacatctccagaacactgcacccaacaacgacacaatatgcattcttttcacctacacgtggcacatacttcaaaattgactacgcacttggctataaaacaatttgcaacaaatgaaaaaaaaccctgaaatcatactagccgtactttcagaccacagcacggtaaaaataaaatcaatgctaagaatatctctcaaaatcatggaaattgaacaacctgctcctgaatgacttttgggtaaacaatgaaactaagacagaaatcaataaattatttgaaacaaatgaaaacaaagatacaccataccagaatctctgggatacagttaaagcaatgttaacaggaaagtttatagcactaaacactgatatcaaaaagttggaaagatcttaaattaacagcctaatgtcacacctggaggaactagaaaaaacaagagcaaaccaaacttactgctagcagaagaaaagaaataaccaaaatcggggctgaactgaatgaaattgagatacaaaaaaaccatgcaaaagaccaacaaaaataaaagttggttttttgaaagaataaataagattgatagacaactagctagactgataaagaaaaaagagagaagatccaaataagcataatcagaaatgacaaaggggacattaccactgaacccacagaaataaaaaaaaaacctcagagactattaaaaaacatttctgtgcacaaaaattagaaaacccagaaaaaaagggataaatttatggaaacatacaacaccccaagattgaaccaggaaagaaatagttatttttcctcaataaatgattgttctgttgctattgaataacttactttccaactgatatgaaaatgttacttttatcacctcctgaattcttttgtgtacaaaggtttgcttttaaattatctattctgtttcctcaatccattaatcgtctgtcaattcctgactgctacccttgctgatttatctgccttatgtttttttgtgtgtgtgtcacaaaccttgtgtgaacccgagtcccatttgcaatgatcccatctctggctggttgtagttatagtctctgttttctcaattatctcaaagccacctgctcatacataataggctgtcttagcttgggctgctgtaacaaagtgctatacattgagtggcatataaacaacagaaacttatttctcacagttctaaaggctggaagtctgagatcagagtgtagcagggttgggttctggtgagggctctcttcctgattcatagatgtccatcttcttgctgggtcttcacactgtgacaaaagggtgagggaatctccctggggtcccttttgtaaaggtactaatgcaattcatgagacctccatccttatgacctagtcaccttccaaaggcccctcctcctcatactgctaccttgggggtaaggatttaaacccatgaattttgggggcacacacacattgcagttgacaaacacactatgtgtctgaacacatctcatgggcctccatctattactccaggaccctcagctcctgcttggtctcagtggccaccccagcagattgactccttctgggtgtgagggcttccacagctcagggccagcctgttacctgtcccaggagggctggcccttctttcctgtgactcagcaaccaggtcaaaaggtttccggatcctcttggcatttctgtacttggatgaagcaccccaccaccgggcgtagaacctgacttttggagtggtcaccttgggagcaggtgacaacccagacatgcagggtgactctgaccaatgaggaaggggatgcaggaagaatgtaggcaactaagttcctatttttcctccaccccatgggctgctgtgaggtagaatttttccgtgtaacctatcagaggcatctgcatggccaagggaaggcaggggctcagtgactggctgtctccatgtccccagaagctagtgtagtgacaatctcactcgcttcccctcactctcaccgccccaggtttgcacctctccaatggagcaatagtatttaatttttgtgtcagtctgtgttcaaagaaatctaggttaaaaaaaacactgtgtcctagacaaggaagatattcatttctgtattactgctgttttttcttttctttgtactttctctttttttcatagaaaattaatatttgcacccaaagaagcctctgtttcaaaagactcagctcccatgactttggcatgttacatacctaagaagcgtaaatgcaaaacaaataataaaccccaacaatcaggacattgtgcattactgtatatgtgtgttttactttgccaaattgcagaaaagtagattgaacatctagattagggaagccaaagctataacacgtggatagacatctttagttgtagatttcggtgaagtaagataactagctgtttagatctctccctgtccagggtgcacagctacagctagttagtgtcaggatgtgcaatagtttggggtccttattctgaacttctctatactctaggagccttcagatgatgcctttagtatgatgatttatcaccctggatgcaggaaacatctaggaagatgtttataaaaacattatacctgtgccccaatcccggagatttcactggtcaggggtgggcttgggcatggcttttttgttttgttttgttttgttgttttgttttgttttttgagacagagtcttgctctgttgcccaggctggagtgcggtggtgcgatcttggctcactgcaagctccgcctcctgggttcacgccattctcctgcctcagcctcccaagtagctgggactacaggcgcccaccaccatgcctggctaatttttttgtatttttttagtagaggcggggtttcaccatgttagccaggatggtctcgatctcccgacctcgtgatctgcccgcctcagcctcccaaagtgctgggattacaggcgtgagccactgtgcccgtcccaaagtcatgctttgcagagtttctacaaataactgttcagtttctctttagaaatcatatgactggccaggcacggtggctcacgcctgtaatctcagcactttgggaggttaaggctggcagatcatgaggtcaggagatcgagaccatcctggctaacacggtcaaacgtggtctttactaaaaatgcaaaaaaaaaaaaaaaaaaaaaaattagccgggcgtggtggcgggtgcctctagtcccagctacttgggaggctgaggcaggagaatggcgtgaacccaggaggcagagcttgcagtgagcagagatcgcaccactgcactccagcctgggcaacagagtgagcttccgtctcaaaaaaaaaaaaaaatcatatgataatggtctctgtttaagagaggaaaactataaggatcttggaatcgttgcctacattgacttagaaagctttatttttagaacataattttaaattttgaactaattatgaactattaacttatatatgatgacacaataaaataaaagctgttttgatttcttggtggtacttggtggaaagccagtttattggggcaatatactgtcctcaccctcaagtgatcacagattgctcaggggacataagaggtggggttggggagctgcaatttttgctgtcattgaacagcacaggggtacaatttgcatcttttcaggtattcctctttgctagaccttacgggctagaagaaattaaagagaatgaaatggtagagaattttttttggagaaaaatatcatcacacatattaccaatgtagaacaattatgattataccgttttaaggatctcagatattttcctgcttagagtctatgtattttcatttaattattaaaaagtacaggattatgtaattttttttgcattttatgccttgtggttagaccctaagtattaaaaattgcctctacttaacagtggtgcagtcttaaaaattctggctatggtagcaaaggttctggtgttggaatattgttggcctattagattcagggaactattttgatggttaagagtatttctgactgggctaagggcatcattttatctttctttcatacctatatgtggttataaatgcctagttattttgtctatgaaaatcaaatcagtttctacaacataaacagcaaaacaaaaagcatccatgaatcagcaaactttgaagtggaattttagcactaataaaagcccttgcctatgatcgagtcgccctctttaatgatttgcaggtcactgttcatcttttcctttccttgctttaccattaaataaatctctcccaggtgtcccagagagactccttagaggcagcgttccctcttgtcttgtgagaataagtctaagacactcttcattttggtgagttgatggtggggtttgtaaatatccatatggtcaaacacgcattggttgaggccatgcagatcttgttgagcaacacagaatgcatcttcgtaccttcttccctctccagcccaatccccaatattttggcaagaataaatccatagctgcaacatgggaagctagatattcatgccaaatcacgacatttgagatcaacaagttagaaaaaaaatccatgacttttcatgtagcactttagggtgacctggctcagaagttatctagggcagaccaggccaatggctatgggacattccctgagacatcttttggactcttccttcttccaacaccctggctcatattcccactcaaaggaaatggcaggaagtgacctacagacaggcagactgtctgcagagagcaaaaatctcctttgaggaccacttcatacacccacccacaaacatgaaataagtcataactgattcatcctgccagccaccagggatagttggattaattgaacactgttcttaagaaatattcagctgagggaggtcaacgaggagatcaacaaccaggtacaatgggaagctcagctttggtattctgtgctgcacactccacgtttacccagaagatgtgtaattgcttctgagaagctgaggccaggagcagatacctctaacaagcgtgttctgagtgttctctatgagacctgggagctggaccaggttgtttcttagcgctacctccagctctccctcattgttcttcttttgatatagacatcgtgatttggaggaggaatgccttggcagccagagtggagcagtcgaaaactgtgtatcataaaaatgaaaatgcattctcttaggtttgtgggcgcttgtgtcaaggcctgaagaatgagctcatatcacaatattgtggaaatattgtgattgtggaaaacgtattgcatagtaagtgttgcctgtgatagtatcacatgagcatacacccgcacaagaagggtgtgctggagtgggcgtgctagagtggcactgaaggaagcacagtactatcttttcgtatggcatgttggctttgtgtttgacagtaaagggaataaaataaggtcctcataattggagcacttctgtgtgagtagaggaagataaaaagaagtaaaaaaagaagatagaaaaaagtaaaaacttcaatgggattttagggggagtttgcacttatatccagcatataggaaaggctttgcagacagtgggacaagatgtgggctctgggagatggaccagggcaatgacagtaagtgctgcatacagaggagacacctaaacagctgactgggtcttgggagtctgggtatggaaagagttaaagatgactctaggctcaagcctggaagcctaaaaggtgcagacaccatttctaggaataagaagtttcatggagaaggatggagttggacccaaaggagaagagaggagaagtctgtagatttggttcgcaatctttgactttgaagagctgagaagagatgtttagtaggaaatgagttggagttaatgagacactgtggagttggagggttttgaagaccactgggcaaggggacagtttctttgggattggatgtggtcatgtcatgaaagctttttcagtggagctcagtagaagccaagttgcaagtaattgaagagaaagcaggcaaaatgccaaggcatgttgatggtctctatcatgtttatcgttgtgtctgagaattgtagcaccgtactgactcaattaacttttgttaatacaagggaaagtgagatattgaatgttagcttaagtggagtcaagagatgttttggattatttattttagggcagaagaaatttctcttgcacagggaaaatatccgtcacagagaaagggaggagatgcaggagggagaagacagcaagctgggaaatcatggcagtgtctgtctcaggggcgcagatgcagggattaaatttggaaaggagcaattatcaaccctacgttgctaaaggatttgggagcaagggagcgtttacctctgagtcaagagtgaagggggagaatacaggtgaagctattgagaaatcccaagagtgggaggtccaggttgaaagaacttacattttatggcttcgttactctaaaaaagtatatagaaaacaaggtcaacctttgtgagtaatgtgagagtagttttggggtaagaggcagcagaaaggaaggttttcagcagctgtgtagagaattatataggaagtgaattaggagtgaatgaaaagaagttaaggagtgaatgtaaattccaaatggattttaaaaattatgagatttgtggtagagacagacagtattagccgcatgctttttctccatcagtgcttagttctttggcactggggtggagaaagaagaccaagagcgggtagaagcttcctggttagtaagaggatgagcaatttcagggaactagtcagagcacagtgagctgactgtggggaggggagaagagccctgagttgataaaggtcctgggaaaataggatgagtcaaagaaggagagagcttcatgagcatccaggaaggcttcagaaagagcaagggtgaggcagagatggaaggagagaaggctgtggttagagagaggaattttcactagagattttttttccctcatcagttcaaatccagcctgggctgtgtaccttatataatcattttcatcatgttggttggcttgattttacggtttctgtgttcattagaataagatatcctgggaaaggaaatgtaaagtcgcctctcttctgccacagtaggatcacgtttgaagagtcatgtttagttccagacatttcctttaactatgtattctctgcagatcccactggtaccacctgagaaatactgaaaagagtcactccccagctccactgctctctttctggtccaagtcaccgtgatcctgtgcgtggatcatgactctgctttcctaattgtcctcgcttctctgcaagcgagggtctgttcttcacagggagccgggatgactgctagacattgtcagtccatgtggctccagcgctgccagccttcctccagggcctgagggccctaaccacctgatcccggttacttcttcagcctcatctcctaatgctttacccttggttctttctgctctgcccacacaaacattcttggtattcctcaccccagggcctttgcacttgctgctcccgcaatccggaatgttctacccatcatttatgacttagttcctcactttctttgggtcttcatcaccttcacagtaaagccttccctgaccacactattcaatagtgttccccaggccgggcttggcagctcattgctgtagtcccagcactttcggaggtcaaggcaggcagatcacttgaggtcagaagtttgagacgaccagcctggccaacatggtgaaatcctgtctctactaaaaatataaaaattagctaggcatggtggtgcatgcctgaagtcccagctacttgggaggctgaggcaggagaactgcttgaaaccaggaggtggaggttgcagtgagctgagatcgagccactgccctccagcctgggcaacagagtgagacttcatctgaaaaaaaaaaaaaaaaagtgtttctcacacatcaccctgtcttccttcccacttttatatccccttctcacaggctattaactttactcttttatttttttctttactgtacgtctcttccaatgagaagggaactccacaagagcaggggtttttattttgcttgtttgtggctccatcctcacttcccagcccatagtggatgctcaatgatgttcactgaatgaatgaatattgaattacctggctataaaagtcatatatgcccattgtagataactgggaaagcacagaaaactatataatataaagatatgtgtatatacacatatacatagctctatgtggaaataacctctgctaaaattacagtggaattgctttttttttaaaaaaaaacacacatatacatatgtagtttatgcatcagtagggatattggtaaatagaatgagattgtgggtatatgaccaaggggataaagatttaaaatcatattatctgatggactgtttttgagagatacttaacctggagatgaccaggatttggagagcataatatacattttagatatttgaagaattatggtgtctaagatgaagtatacttattctgcataattctggactagagcagaatccacactactggggaaagatccagaaagggtagtgttggctgcatagtgagattaattctctccggtgggccacccatctgtagggctaaattttgaagaacagagcttgacatccatagaagttcaaatagaaacacaatggcctcctgcgaggtatttgctgcttgatggctgtcgtctaaagaatctatggtagaaaagacacatttaaaaaacctttaaggcagttttaaacagctaacagtaaatttgatagcaaccacaggacattgcttatatgtctgtgggtattttcccttttctataaaatatcttttctatctattacagagtagtaactcacatggagtatctatttactgtttattttgtctcttatcaccccattggtcctcacagttttaagtgtcgtattatcacggaagagagtgaaaatgcatttcgttagccatgcataagacagattagaccaacaattcattttcttttaaccaatctatttctctatttttagaaatacattactccagaaacatcaggaacacattaagctccataataactgagattttaaagccatgttttgaagaccctctaaacccaactgatataaacacatttaagcctgacatggtcatgatgtcatttgtcctgtaaacatcttttagcctttggagaaattgtagcagacatatcagcaggattcataaacaagccagtggaaaatacacacagagaagttcataatttgagtaatttgtgttgaaaaatcacaggacatcttgatggatttataactgtcgtgataaaattaacagtgcataggccaggcgcggtgactcacgcctgtaatcccagcactttgggaggctgaggcgggtggatcacgaggtcaggagttcgagaccagcctggccaacacagtgaaaccccatcatctctaccaaaaatgtaaaaaaattagctgggcatggtggcacggccaagtcaggagaatcacttgaacccaggaggcagaggttgtggtaagctgagaacacgccactgcactccagcctgggcaacagagcgagactccatctcaaaaaagaaaaacaaaaacgaaaataaacaaacaaacaaaaacagtgtagagtatttttactttgaagctattggtactttccaaatatctgctttttaaaaatttaatttaattttacgttccaggatatatgtgccggatgtgcaggtttgttacacaggtaaacatgtgccatggtggttccctgcacctatcaacccatcacctagatattaggccacacatgcattagctatttatcctgatggatattttcaggatatctgtttttaagaagaataatgtgcattcatttgaattgctgaagtttcgttaaattcactacaaattatttatcctacatatattttaagtcagttttaagtaagactgtttttgaaataaatttgaggtattttagcataaatcactcacaaaataatttttaaattctgtaaaattctatttgtttgactttattgccttaagattcctgttatgattgttttttgagataaatttagcagtacatcagtcatttaaggtttattttacacttgagcaagtggcaatgtgtggcataaaacaagccctccctattgttataaatgaagtgtaatcaagtagattataataatgcaaggtgaaatgggagacaaagcagttcttagccagtgctatccaggcaactcacctttgtactccgaatttatctggattaccaagataattgaggggatttttgctcaggtaattgtagttgggtaatctggacttctcttccaatttgatttgaatgaagcctcttaagcagaaacatatgggcatggaagagcaagcatcggaactcttaaagggcaataaaaagtatcctaaggatttataattggatggcgtcttccatccagatggattccacagcattttaaggcttgtaaaggaaggccagatagacgtaccacagtgccctttccactccaagttgtggtcaagtgtagtgaaatttgcagcacacgaattcctgcttccttcccttccaccccagtgcctccccagccacccaagcgctcaaaggcagagctaaagcaaggagctccacccagagccaaagctttcctgatggattctgctgcattgctgggttgtgctggtcctcctctggtaccttcttaatctttgctaaagatgtatgcccaccattgtcacccccaaaatgtccatatactttgagcttggggttgaccagtcagctgacaggtggcacatactttatggaggcagatggaaaaattttacattcagcagaagagcctaattcctagcaaggattggattgagaaacaaggagcattagaaagctccagaaggcggggtctcaggcctgcacatctgtcaatatatgatgagtgatcgggcctatgcctgagtgtaaccctccttgaggagggggtttcattccactggagcaagagagggaggtggatgttcttatcatctcatggcctcacaggggaatcatttgatgtcaggattttaagagatattaagtaattcacttgccaggggtttgcagtttactaataattttatttaacttttaggttataactgtcagggtgagtcagttgtgtgcaaagcataggactaggaagaggggtgatgtggagtgactgccttctgagcacgtggtttccttttggggtgacaaaaatgtttggaactagacagaggtgttggttggacaacattgttaattaaatgctactgaattgttcactttaaaactgttagtttcatgttatgtgaacttcacctcaataagaaaccaaatatgtttgaatattttttttcttttaactggcacagtggctcagcctgtaatcccagcactttgggaggccaagatgggtggatcacttgaggtcgggagtttgagaccagcctggccaacattgtgaaaccccgtatctactaaaatacaaaaattagccaggcgtggtggtgtgtgcctgtaatttcagctacttgggaggctgaggtaggagaattgattgaacctgggagttggaggttgcagtgagccaagatcgtgccactgtactccagcctgggcgacagagcaagactctgtctcaaaaaaaaaaaaaaaaaaaaatcacgtgttggagacgctgttttatacctctgtgatgagtcaaagaaggactgggaaaatgcttcaccctccaagacgccaacctggggtcagagcatgggtatacgtgctgtgctgactatgcttacggtcagtccctgagagccgctcctcgtctatgcacatataggagcatgacccattagcaaaacaaggtgggcagaggagccagacaggcaggggcttcaatggtaaggaatatgctcaaaatgacctcttaaaaaatacaacaatgatttgtaagtatctttaatctttagctttttcactttattcgtcgatttctgtcttctcatgcttaaaaataactcaaagttatatttatatgtctagaacagtgaacataggatgtgaatcatgtaattttacattttctagtaactacctacactaatttccatcatgtattttcttttaatacaatctcccaggatatatctgaagagtccagcatagccaaaatggaatctttttaatatgtaatcaatataaaaatgactaatgagatacttttttcatagaacatcttccaaatccagcatatattttgcacctacagcacatcttaatttggactactcacttttcaagtgatcagttgtcacaggggctagtggttgccatttagactgtgcagttctaggagttgtgatttttgttgcgtcctctctggtgtcaggagatgctcagtaactaaaacataggtgaagaatgataaacatcacattatgcattagtttacagcctcagcatcgttaaagtgccttcagctcacaatatggtgaatgacataaaagaaatagtattcttttccattttatgagtgagaaaactgagattctgagagctgacatctgctcatttattcctgcccaggaatggcttaactgctgctctggtttcctagttgtcttggacaggccctgggcagtctctgttcctggaggaaaagatttatgcactgtgaaagaaactcagtcattttttacagaagagaaaatgagtctcggagaagtacagtagctctcttggtggtcatgtgctagtcaaccatggagcttgaacaagaaccatgccaagagctcttttcaattccaggtaacaagcacaagcccacatgtcttctgtcccccagcctgctggccagtcatgtttggccatatagttgaaagcaaagggtatgtaatggaattacatgactccatttaaaacagagaagctgacagactagttcactgccttagccacttagccctgggacaaattctggctagataccaattctagaaacctggaatttcccctgacaatgcctctcccagtgcagctcagtcataaagcagggagtggctagatggaagcccattactccgtaggtcacttggtcactttggacacaattctatctccttgatccaagaactaagaaggagggagaaccaactagacccaggaatcttcttttttttttaatgagaagaaccatgtttgatttttatgactttttgttatagtaaaatatacataaaatttatcatcctaaccattttttagtgtacagttgagtggtattaaatacattcacattgtggtgcaaaactcaccatcatccatctccagaacttttttcattttcttacactgacactccaacccattaaacaatagctttccattctacccttctctcagcccctggaaaccatcattttactttctgtttctgtgaatttgactgccctaggtaactcacacaagtggaatcgtacagcatttgtccttttgtggatggcttatttctcttagcgtaagataaataagacaatctcttaactttccaaaggtccatctgtgttatagcatatgtcagaatttctctccttttctaaggctgaagatatcccatgatatgtgtatatcacattttgtttatccactcatctgtggatggacacttgggttgcctccaccttttggttattgtaaataatgctgctatgaacatggatgtgcaaatatcagttcaatttcctgctatcttcatgcggaattggtgaatcatatgttaattctatttttaatttttgaatcactagactgttttttatagtgactttcccattttactctcccaccaccagtgcataagatttgcaacttttccatatctccaccagcacttgtaattttctgattttttggtaatagtcatactaatggctacgaagtatttcattgtggatttgagttgcattttcccaatgattagtgatgttgagcataatttcatgtacttattggccattagtgttatctttggaaaaaattctgttcaagtcctttgcccatttttaaattgggttgtttttgttgttgttgttgagttgtaggttatatacatatatatatatatttttttttctggatattaatcccttattagataaattattttcagatattttctcttattttataggatgtcttttgactttgttgatagcttgtttgactcacaaaagtgtttaattttagtgcaggcaaatttgtctcttttatttatgttgcctgtgcttttggtgtcatattcaagacaggcttgtgaaatccagtgttatgaagttattccctaagcattttagagttttctcataagaattttagagttttagcttttattttttggtctttgttctattttgagttaatttttgtatatagtataaggtaagagcccaacttttttcttttgcatatgtatacccagttttcccaacaccagttgttgaaaagactcctttttttctcattaaatgatctttgaaccactttcaaaagttatcagaccatatatgcaatagtttatttctgaagtctctattctattccattggcctgtatatcttagaccccagaactttcaaggacacattgaattttactttcctctcacacactaaatcttgagattttgtcagccataaatttatctatttagttcattgatacgttcttttctgttttggttatgcgaagacttaacttgcaaaaagaaatttcagtgttgaaatatttttagccaaatcaatttagcattttaaagtacagcttgattagagatttgcacaattttcactttgcattttgaaatgtaaatactgatgacagacttccattgtcttgtttgctcatgcattcattcttcccttcaacatgcactgaatacccactaggtctcgggctctgtgttgggttctacacattcaaaaccatggtctgttgcctctaagtttagtggtggatacagctgtgcaaacagttgctttaacagaggatgcataaaatgctaggggatgcagaggagacgctgacgtcccagaggagggcttcacttagaagatgaggctggatctggtatggaaggatagataggagtcctcaaggtagataaagaggagaagagtattttaaacctgggatggaatgactcttcttgaaaccacagttcttttcatgtgggctgttttcccaaatggcttgttctttgtgttactactgaccagctttccagtatagagcctaggtggagatatggcttgatgactctggtgggcttccaaagcccctaagtataagtcaggtttggttggagattacctcagtgtctacctggagagtccattaatcgatttttaggggtaacttaccagcaagatatttaatctgagtctgatggaaatcatcacatgtactccatccctaggagtagagagggggctaattgctcatggtccatggcccacataacacttgccgtcagatgtaataacccaagattgggtccagaaatggttgcttaggcagggtaaaggaggaaagaggatgagatgtgaaaaaagcaccaagaagatagtgttgattaaaaaaaattgtgttttcttattggttgaaaatatgaatttaataagaagttctttctccccctgaaatcccatagcgttttatctgtattcctcttatgaaagaagcagctgtatgataatcaagcacgttaacttttaaacacaagtgaatttgtgggatcaacatggcaaaatattagaaattgcaattgaattgaaaaatctaggaagtatagcagttttcagcagtgaacatattttactttatattactgatatttatgtccttgcaaggctttaaatatagggtacttccctaattcgtctttgggtcttccaggctgcccagcacataacctaacacattgtgggttatacatgaaggaatgaacaaataagggaaaaaaataaaggtgttttgaaaatcataaaatattcacgagtgtaagatgtacagtgggtttggtaagtgataggtgctataaaatcttttattttttaatttaatctttatttttggttgtggcaaacacataaaacataaaatctgtagtcacaaccactttacagttcagtagtgttaagtatattcacattgttggtgcagcaaatctctggaacttctttaccttgcaaaacagaaacttgatgtcaatcaacactccccgtgttctgcatgctcccaccttttggcaaccattattactactttctgaacttggactactctaggtacctcacataagtagaatcatacactgtttgtctttttgtgactggtttatttcacgcagcataatgtccttaagattcatctatggtgtatgttgggggatggtgggggtgggagagccttagggaaaatagctaatacatactgggcttaatacctaggtgatgggttgataggtgcagcaaaccaccatggcacacgtttacctatgtaacacacctgcacatcctgcacatgtccctcggaactttaaaataaaacgattaaaaaaaccactttaatttaaaaaaagattcatctatattgtacaatgtgtccaaattttcttctttttaaagactgaatgacattttattgtatgccacattttgtttattcattcatctgtggatggacgattgggttgctttgaccttttggctattgtgagtaatgctgccatgaacatggctgtacaaagaactctttgagatcctgctttaaatttttttgaatatatacccagaagtagaattgctggatcatatggtaattctatttttaattttttgaggagccaccatactgttttccatagaggctgtatcatttgatattcccaccagcagtgcacaagggttctaatttcttcatatttttgccaccattgttatttttaattttttttatatttcatagtagccatcctaataggtgtgaagtgtaaaaattattttctaagactaaagaatgaagctattgagtgtcacttgcttatcttcaagcagtcaatgcttttttaaaataattcttcaaagcagactatatgttgaagtcagaagcttctgatgtgtgactttcagggactctgaaacaggtgttcatttggcaatagaaactgatgaaacattcaaaacaactttctctcccaaaccttaaaaagaaaaattgtgacattaaaaaaaatcacaaattgtttttttcttgtcagtaatgacttactggttcatgcagaggtgaatattggtaggtaaataatcccaggactgtatgctgagaatgaagctcagagcagacccttatcagagtgtctgtcttcggaaatacttgagtcaaggagctgtccagcaggagagaggggagttataaaggctttatttgcatgtatttgcaactctttgttgcagtgtaagtataagtgaagtgtttagtataagtgaagtgaagtgtgcttctgtgtatggggagggagagaagggaggagggtgagagcacttgttccttgtataagaaaaaaaatggctctatttacatcgtaactccccatgattagtgcatgaaggaaactatatattttctgaaggcaggctattttaagaggataaaaactgtgacatcatccaggagagctaaatatcagttgagcagctagtataagaggtatatgcaatgagttatgaggctctgaaactttccacgttagtttacgccctttgcggcatgatatgaagacttttgtgtagcctaagtgttggttttaatgaggtattgcaatgtacactcaaatgaaaaacacatgatataccccaggcaagagagaagcaataactgtacatatttttgaagaagactagtcataccacaggctaccattataacagaaaaaacaacaagaattttaatacagttgtctggccaaatatattaatttaaactgaatgccttttaaaaaatattatagctgtaaggcacaacgttccattggcaagcatcttcaaaaccttcattttagaggattgaaggaaaaagtgcaagcaggccttcccggcatgtacgtttggaagatccaccaaaaagtctttgatcatttatgtgaggcttctttgagtttgacacaaagaagctaaaataaaaataaatgaatttttaaaccagttgtcgtctttgtatttacataagagaatgactgagatgccttctggaattctatggtaagaacactgggttgtgcatcagaggtcagctggtgctttgctctgtctgtgtgttgacctgagttcaaataactgagacagattttcatttacctgtgacctcatttgggtgttagccctgggttctaataattcttgtgcaaataaagtaccgtatgttgtgtgttccttaatttagaaatctgaaatctcaaagtgctttacttcattttaattcaatagtgattttactgacttcctgcttcaaggaacacagaggtgaaaaagagctagtgccctcagatggcttattacaagtagatcatttttgaccaaatgtctctaaaatcggttgagaactgatacagcactgggaagcttgttgggtcaatggacataatttttattaagggatttcgttgtatttcttttgagtccacttcacgtataaatcaccgatgagaacatcagggtggcagttacttctactatccatagagatcattgaattgcaggtatgtggagttggaaggcagctgaaaatccatgtcagactttgatcagtgtcactaaagccccattctcttgaaaatattgcaaatgatggggatgatctctttttaccttgaacacatccagacctgtgattataatcagaaatcttagcttttggctgttctcattccagttccttaaagctccttctgacacaccagcctttcacatacggcaccttctttagaatcccctgccaagaatcaagtgtttccaaactagaattgctttagatgatgggataacacaaggtgtcaaggcttcttttagttttgtgaagtaactttcgtagtgacttcagaaatgattttccatcatttgaaatggaagcctacaatcacatttccccctaaccacagtcttccagctgttaactattgtgtcttgttatgtgggtgggtgggggtggggaatcggtatatattttccttgcaactcaaaagaatccagaaattagcaccctggactcacataacagtttatcttgttgaaacccccatgtgcccaattattattggttgtctgtttgctcctgtgagtaacggaatgagggtctcaccctttgttaccttggatcgtctggctgagaactgaactttcttgttcttattctctttgtgatctactattattctggaagcagccaaggaaatactgaatcttgatttatacaccaacacaatttgactttgttttgagaggcaaaatataataatatttttctttcttctgtcagttttatttttttcttgaaatgaaccaaattgtctacacaattgcctcagttgaaagaaagactctgtgaagcttttcctggcctgggttctgtgtaacgcactgcacttgggttctgtctgaatttgactcctggagctcgccaagccctgatgtgtaattggaaacatgcacactcactcacagcagcgcttgactctgcagaatgctgcggacatttttcccatctttgttcattcttattttgtccctgtgccatgattttttaaattgaattcaaatttgcagcttctaaaagaaaaccacaagaacatgatttttaatctcttgagatttgcttgccgctgttctacatataaaatagcaatttccttaatatatctaagccagatttatgaaacaattaaaaatggcatcttatttttttttaaagtcttttaccagttaaggaagagcgtgtactaccaaagcaaaacaggttttgcctctggcgagtctgagaagtaggaatggctatttacacagacccttcttcaaagtgtgaaggagggctcaaacactgtaaatggtgattttagccttcagccagattccaaacttggaaggaaagaaaagtcctcacaaaaccatgtcgcctcatgtgaagtgatgtcatcatgttggggagaggttacctagagaagatgaagcatcttacagattactttatttgtgagctgtttctgattattccaatggagggaaggtcactttgaataatgacgccttgtcattccttctgtggggaatctacactactagtcaccagatgtgctgggtcaggcacttcaggcttcctgaccataagctccacgtgttcaggtcccctttgtgtgtgtgcccttgctggaggaaggccaacctgaagcctgctctccctgcccaccaccccaattaaggaaagctgtggtttgtgatgatttatcatcaatatctgtgtctacaggcccagtcatcttctccgagtatgaaggtttggcctgactgtagttcagcagcttcccatgtagaactttattcgtccttttgagctaactattaaatactattgagccttttctgaaatgggaattttcctctttagacatcattacaaaatcctgtgactcgacgggactttgaagatcagttgctcttgcagatctttacattttcaacgttttaaagactcttaaaaggtataaaatgagtcctattgaaatcaaattcactatgtagcacaaacttgctcatcttgatagtaagtgagccttcatgtgttggaattttcaggaaatgaagatgtcgcctaatgatgtagatggtagattgagagggatttacagttattatacttgccaattctacaccgaattgaggactctcctgtgcagaattctgccagacagttttgagaccttttcttgactttcttcccctggagaaggctttctggcctctctgtaaagttcacccaatggtcttagatccaccctctgcaacttactagaaccataggaataagtaaatccctttttcaaatggaacctttcaactatttgaagagaacacaatcatgcctcccttcaaacctcattcttgctggacgcagtggctcacttctgcaatcccggcactttgggaggccgaggcgggtggatcacttgaggtcaggagtttgaggacagcctggccaacacgatgaaaccctctctctactaaaaatgcaaaaattagctgggcatggtggtgtgcgcctatagtctcagctactcaggaggcaaaggtgggagaatcacttgaatacaggaggcggaggttgcagtgagctgagttcgcaccattgcactccagctcaggcaacagagcaagactctgtctcaaaaacaaaaacaaaactaaaaaaccaaaagtcctcgtgtcttctgttccaggacaagtccccagtttcctcaattgttctttcccatggtttttgtttatttttatttttgagacggagtttcgctcttgtcacccaggctggagtgcaatggcgtgatctcggttcactgcaacttctgcctcctgggttcaagtgattctcctacctcagcctcctgagtagctggaactacaggtgcccaccaccatgcctggctaatattttgtatttttaatacagacggggtaacaccacgttggccaggctggtctcaaactcctgacctcaggtgatcggcctgcctcagcctcccaaagtgctgggattacaggcatgagccaccgcgcctggccagccatgtgtatcttaatggaaaaaataaagacacaaatcagaacattagatattttattctaatttgatactctgttgagcctcctataggtaacgtggcttctctctaagaaaataactcatcactgctccccaaggctactccttccctagcattacccatcttagtattaataataggataaccatttactcaggggtttgtttaagcccaaatgcctagcatcattctttaatcctctttccctcatagccatccaccaacaagttctgtaggctccctcttcaaaatagatcccagtgtccagttctccacctcacttcctccaccaccagcaccttaattcacatcactagctcattctcctggagactgaagtcacccctccctcatctccctgcctctcctcttggcttcctatagactgttctccacacagaagtcagagtgttttcctcaaagtacagatcagatgagatttatgccctgctaaacaccacctcatacttccctcggcaatgtggataaaatccaagctcctgttcatgttgccaaggcccttcaagatctcacctgcctccagcaccactggctcactctgctgtggccacactggcttcttggtggttctagaatattccttattcatttctacctcagggcccgtgtgctccctgctcctgtaatataatttaaaaggttgacaatgacatcctcatttaatttctacctgaatcattgctgtgaattttatattggaaatgcagacatagtatctttttaaaaaattaatagaccattctattattaatgctaatattgtggttctctcaatgaagcttaaaaaactggctaaatcttgccagaaaggatatttaaatattaattataccaaattttaataaatagttatgtttacaaaagtttgctatgggccgggcgcggtggctcacgcctgtaatcccagcactttgggaggccgaggcgggtggatcatgaggtcaggagatcgagaccatcctggctaacaaggtgaaaccccgtctctactaaaaatacaaaaaaattagccgggcgtagtggcgggtgcctgtagtcccagctacttgggaggctgaggcaggagaatggcgtgaacccgggaggcggagcttgcagtgagccgagatcccgccactgcactccagcctgggcgacagagcgagactccgtctcaaaaaaaaaaaaaaaaaaaaaaaaaaaaaaaagtttgctatggcttcctaatgtataatactaaacaacctaatatgggttgaatcgtgtcagtaattgtgaagttctaatccaggttcaagtgattctcctgagtagctggaactacaggtgcccaccaccatgcctggctaatgttttgtatttagctggtccctcaaaatgtgaccttatttggaaatagggttattgcagatgtagtagggtgggcccctaatccagtgcttggtgtccttatgagaagaggaaatttggagacagacaggtatatgaggagaaggccatgtgaacgcaaaagcagagattgggatgatgcttctataagccaaggaacaccaaagactgcagcagcccccagaagctgggggagagagagcctagaacagatcctccctcacagcctcaaaaggaaccagccctgctgacaccttgatcttggactttcgacctcagagctgtgagaaaatacatttcggtggcggaagccgcccagggtgtggcactttgttatggcacccctgggaaacgcatacaatcttatcagaccaaactcacggaacaatctgagatccacagttgtgcctaaatcattgctgttttgaagacagccacatacagtcacatgttatcattgtcacgttagggttttaaccagggtagttgttcagtaacctctggcttcaaagcttctcagggcaaggccactcatacaattttgggttgccctttgctgtttaacaggtcctgctctcctggagaattccagctttttctttggcctccgtgtaagagagttggggggtggggctccatgcctgaggatcagaggcagaaaactgcaatcaacgcctcctcttcagacccttcctggtggtcacagccctgttcatcatcagctgcggtcaaaactctggctgagaaattgatccgctcaggaatcattcagggattatttaacccgtcattcctcagcgttcactaagcattctctctgtcctcagccagcaggaagttaccaaccacagggttttaaaaacacagattcctggtccacctcagagattctgattccacaggtccaggacgtagcacatacgtttccatttccaagcccccagctgcagctgaggctgctggtctgagaccacacttggaatagcgctggccttcaaggactagaacacattcttgccgcactccatgtcgaatcttcttctcactgtttcagtctaatattatgcccttgaatttcaccaagggctagtgtgggataggccatgtttgcagtgcctgattgttttagagaggtcagagaggtcatctcagagacttcactcattatggtgctcagtatgcgtcgtggaaaattactctcagatctgaggatgcagacgtattcagtcccttcttaggaattggtgaacatcttagtagatggtgaaagttctggaagtcatcatctttctcccattacttgcagaactgggatttttcttaattgctacagcgtttcttagacagaattctcaacatagttttttcagttcttaatataatttcctccttttgctgcttgattttgtactttcgtatgttctaataataccttcataccggtgtattttattcattttattttaaacggtaacatttttattataacgttaatccaggtggacattttagtaaatagagttagtacaaagaaaattaaaaccttcctgaccctcctcactcagaaataacatctatggacattttgggggattagccttctagttaatatatgcatgtattttaattaaattatgtgcatttatatataaatctttaagtttacttgaaaattagaatgaagataattttgctaaaattaaagacatcttactcacagttttattcattgccatatgtgtttatcagttaaatcatgagtatcgttctctatcatgatgcagtccgctgtgacatagtgtagactacaatatagtcttacagtcctgctctgactcttttaggtagtttccagttgttactacttcagacaaaattatgattaatattatagcagatacatttaattgatttagtataaaattatagaaacggactacttaggggagagagggagaggtgcaaattagagtttacatttttatcctaatccctactggatttgagttcctgtttctaaagaatttagtccactcatggattatttactccttgatgggcaatccctgtccttcagccatacccgagaaggacagagcatccctcatcctccagtggtcctcagtgcttccctcacacacagcacctgcacatgtaacagaccacgccatcacatttcttagtccctctcttcttcaaggcctcctttacaatatcatgtctttgagttcatactccccataaaggagttattcttccccaacaatagtcagaaaaagtattattattattttttttaaacggattcttaatggaccactgttaatcgtattgccttaaagaaaaacaagcttaatgttttgttcagagctctcattggcccatttggctttcagtccgtctctgcatttccacagacccacatctccaccgaaggtgtggttggtagaaggactggcaaagactttgcgacttgggcttgctttcttcctcttttctgcacattgcagtaacttggcaggagatgtctagaggttggtgctcccacagatatgcaggtgcctctcctcccccataaaaagctgacgtggttgaagtcacgtaacagcatttaggaggtaacgtgagcaggatctcgcaggaaggttgggtgggggatgaggtagagaaatgactcacaagcaactctgtgtcttggctcggtaactgagagagtggaagaagtgttggagggaaagcactgaggctcaggagagctttgcgcgtgcttctggtcatgtgctctgagagcatctggaagagatgtctggcaggcttttggatgtacaggtccgaatccagaagagggttaaagcttgagtgactgtggaaggcatcgtctgttagaggcaggaaagagcatgggcattaacatggcctttcatggagaacatgggcagggatacagaacccgagagagggtgaatgccaaaaagaggtggcaggaggggcgcggggaagatgtgaggggtgtcagctacaccacgtgtgatcttcacaccacaccagtagggaggggcttgagaatcctgttaggttgactctgctcatttccttggattatctgaaataaatttctcttttagttttaaaaattaattttcttgtctctttctgtagtcacaaatgatcttaattctgcatctacccctactctttccaatagttgcttgatgtggaagcagcacccgcttctaagatggactctcaatttgcgactgttggtctctttgtttggaattaacatgagctcttgtgttttgcccacttttgtgtttgctttaggaagtatttcaaacagagaaggctggagaattctctttcaagagcatttcagaagttatttgctcaccaatgctcaggatgaactgggtgatctctgcttacaggcttttaaacatttccagaataaaggacactgttactgtttctggctctaaaaatccttggatttctttctttctttctttttttaaacagttaaccactttctgtctttttcaccccagtaaagaaaatctaatatcttatcactgctcctgtctcttggagttttaaattacagaatgtttaattaccaaaggtccttttgcttattatattttaaacatgcaatgatgtttccaaaaatactctaaattgaagcagggaaagtcagcaacagctttattcaggtttcattggtgaacagctactggtttggatgtctgaggctgagtaatttcagtgcagatagataatttagctttatgatgattctgttgactaatagtccgaaaagatcagaaaagagtcacatataggaagatgttgactttttccacagtgagccatggttgcataacgattcctagtccagtggtcaacaagttgctgccactttgtgacagatttgaatttattctttgtttatagaaattcaagccagaaaggctcatagtgttggcagctgattaaagcaatttaagtttgatttttgacactgtaattaaatgtgagctcaagtcaaatagtgcattccataccccttccaggtgggcagggctctggagctggcagtgtgtcactgtctagcttgggtttggtctcagggattccaaagaaagctttgatttgtaaatgggtgggttgaagggtgccttccaaaatatatcttttagaggtatgaactaacaaaataaatgcaagaaaattggattaattttaataattctgctgctttgattccaaatccttgaacacctacaaaaacaaagtgtctcttaaatcgcagtcttgcctttggatcccggaactctctgtttctgtttatgagcaggaagagccagacatgtattctgagatggatggagacatacggaggagagtggaggcacctgagaagcccattcagggtaccgatgggccatcactgggcttttgcagccttcagaatgaattcctttcaaattatgttttcgaaaccagatccaggttctttctgttagtgattgttttcatatgaaataacattgaaatccagtagcaaattgggctagatgtagatgagaattccgtgtgggtaactggggttttacggagaattacaataatgagtggggtgaaactcagatattgaacattcatcaggggtgggagcttagagaagtagatcagggtgaccaccggcttcctggccaaagagatttttgtccaaccctggcccccgcctcttactcactgactttggataaaggattgagtctgttttttctaaatatttttcggggagatgttggtgatgaatactcattggaatcctcatttggaaaatggacttggtgttatataagatatatcagcaagaatgttactttctggattctacaaaaagttacaggaataacaaaatagatggcttatttgtgatagacaaccaactatttgatggttcatttaaaaaagtcgaaagctcaggcaggggctacttagaaaacacaggcaggatagaaacattaacccacgttatttttagtgtgccctttttgctacctaagtgtgttttttaagaatgatagggcatatttcagagagcaaacctggaagcattcaatccaatggcatttaataaaatgattttgactagaaaactggcctcacccagacacaatgcctcctttgagaaaccatttttcagagtctgagttgctcccactttgagaagtaactaccctagtccatatggaacaatgcatttcttccccaaacatattttatgtccaagagaaataatttcgtacagcttatacctactttgtttttgttattctgtctccatcatatggtatttaaaaagattgtcagagcaacgtcgttgttcagctttctactgaaaattcacatgagagtaacaactctgtctttggaactggcttgaaaaattctgaagtaaacaagaatttgctttttccttttatctaatctgaaattgatttatgagacaggacctctactgaactgtgttaaataccttggaaatattttgaaccaaactttcatactgtcataggaacagcagaaatatatttgcttgattaaaataaaatatttagatatgcttgatctactacactgtaagttgattaaaaatagttaaagtgttttaaccttgctaggaaagcagttatggcaatatccattttatgactttcaaatagcttttattgattataactttacacaatcatttgtcatattgcaaataaaagaatatggttaatatatggatttttaatttatggtatcctcttcttgcaataccaatataatcaatcttttcaaatgttagtaaatcaagatagaatcttttattagtaaatttatagatatgataagaaaaaggaacaaaaatgcatattttataaagaccattatttcagaagtaaatctttttttttacatttgagaaaaagtacaaatctcattttatatcttgtaatttaagtagccagatcttgtcaaaacttatatatgaaacagcttacttacagcatttcttaaaagcaatttatttttcctgggggcttactcataggaaggggaccacttacgaaaaattattgatgctactttaggtttagattaaagcaactctttctataatagaaaattctcaatttttgtatgatacagcttgtagttattgtatatgacatcagttataacccttcatactgagaactttagctgatgggaggaataattataaaatttaccaagagatatctgaatttcattcatatcatgtttttaatgtgcaagccataagttgcaaatttttggtgaagaatttcacaactaagagtgtctgaatctgcaaatgtacccaagacaccctttaatacttatctgatcaaacttacggtgatcttaattgctaagttaagtccattcagttagagttgcaagtagtatagttcctgtctcctcaggggagctttgtcaccattgtgtctaagttggcctgaaaatttctttagctgattactattttagtttccaaacttccacacttgaattatgtttttttgcaagcaaattcaatgaacttcacttgtaccaggttcctctctcattttattcacctggtgatgaaccgattatatttgtatggaggctatttttcccaatcaccctgaatattgttctaaatttaagctctatgcttctctctttgctttcatgagcttcttttgtcctagagtaacccccacattttttggaggtggcgtcacatagtgttttagatgtgaaataaggagttagaaagactttggtctgaggtctgtttgcttgctgtgactgtgggcaagagacgtaacttctctgtgcctgcctacctttagctataaaatgcagctaataatcgacatatctagtaaggttttgtgataactggaccagggcttggctccgtgtgtagtagccgcactttgagatgctgaatgttgcttgagaaaatgaagggaactgtgtggctggtcttactttaagttgtgtccatgaatctctgatgcacactcactgaagcccggaaatcctcctcctcgactctgtgctgtcggctggctcttctgtccctgctgggcttctaagtgatgggcaggctgaaggttcagctttaatcttggcttttatttgttatctcacttctccccactaagaaatgagatccaatcacatggcttaaaaaccatctataaactggtgattcccagtctcgaatcctgatatatccagctcccaactgatatctcaacatgtatatctatgagcacgtctgatataaagtacaaatcccgatctgctctccccaatcttgtattcttcaagtcttcttctctgtaaagtaaaaacactattttcgcagttgttaagccttaacattacacaacaaccacaaaccacagatcatctctgattgttcttttttcgtgctctctgcctccagtcaatcaccagtcctgataggtcttcctgcagaaactcctggaatgagtcacccgtcccctagaatgatgcggtagcgtcttagcttggttatcccagctttcctttgtgcatgttgacaaaccttttctgtacacaaaaccttcagaacgtgtcaaggagatcagacaatccctaattcatctttggccccaatggcttcccgccatgtttgggattaagttcaaactcctcagtaggatctggctcttgcccacctcatggacacagatgagattgttcagccctggcttgtgtctgttcctcggatgcccctgaacttgtgagttcaaaatcaaaaaggatatttgaggagctgatccttcagtctagagggctacttctctggatctttaagtagctggttcctatttgttgtgcaggttctaatttgatgccacttctcagtgaaggccatcccctccagctcctggctcttcccaagggacaagaagggtcttgggaagaactcctgatgcttcatatctaagctctgtgttccttccttgcagtgaattgatagatgactgcaaggcaaggttatcccttctcccccgtttcatctgcctccttgcaaaagtatttcacacgtgaaaagttttgacctgctaactgaggagaaaagtaaccctggaagttttttttgtttttgttgtgtgtgtgtgtatgtgtgtgtgtctgtatgtgtgtgtgtgtggtgacatggggatatcatacaaacagtattttatacaaaatgctttcagtgtccaagctgagtttcccttgtttggaagcatatcagatggcaaagggcttctcaactgcatctttctccctgcttctacatgtgtggttagggtctcagtcctaatctagttgtgcagccagatatagcatttaactgagagaataatactgcagtggacattcttgtaggtgacttctggtgcacatatacacacatctctattgtacatgtattaaatagtggaattacacagtctttgatgacagtagatgtgccgactttctttgtttacttctctaattcattctccatccttctctgctcctcttgtcctgggagtttgacttctgtcgactacatcaaatgggctcctttgtcctctatcttctgttgggttaagcaaatgagagtcaccacaaggaagcctgagagtaggaggagagagcttggggagtttttttctccagctttctctctttggtcatgggttggcagtgactttttccctccatggaaggccacagctcctattgtttatcctctcctgtgttcacagctaccggtgctgcgtgactgctacctcccttgcccttgtaggcctgagggtagtaatggcttcctgttcttgctagcctgggggacttcctcaccctttggtttttactaaattctacctttaccgttgtaaattctttcattaaattttgttcacttacctatttgaatatgctatatgcctcttattacagccctgatggataaataaggatgttttttaaactccagctgtgtgtgagagttcttattgctccacatcttcaccaacattgttagtctttgttttagacattctgatgtatctgtggtgttatttcattcaggttttaatttgtacttcctgctttactaatgaagtagaagaccttttaatgagcagttggatatcctcttttatgactgcctgtgcagtttcttccctgtttttccttgtgtgtattctgacttgtgtgtattcttattgattgatgggggttctttacatattctggatatgaatagtagattagatgtgttaaagatatcatcttccactccatgcattgccttttgattctcttaatagtgtcttttgatgaaaatttaagttcctaatttttttcttattttaatgcagttcaatttattagtctttcctttactcttagtgtttctgtgccttgtttttaaaatctttcccttcccaagtcaggaatatagttttctatattatgttccagaaacttcatagtttttgcttgtcatatttagatttatagtttatctgacatcaatttttgtgatgttatgagttacttctcaagtttctgtttctcatgtggatttctcattttccagcatcatttaccaacagtttctcccttttttaactactctgcccctttgtaaaaaaaaatcaactgccaccttcgtcaaaaatcaagtgtgtccatatatgtgtgaatctgtttctgaactttcctttcttttccattgtctgatttgtttctacctgcatgaacactattctgacctaattgctgtgcctttataaaaatgtttagtagagcaggttgtcctacctcactcttttttttaagatttgccttttaaaaatggatactataaatagatagatagatagatagatagatagatagatagatagatagatagatagatacacacacacacatagttatggggtacatgtgatagtttgttacatgcatagaatgtgtaatgatcaagtcagggttttggggtgtctgtcaccttgggtatttctcatttctatgtgtcaggaacattgcaagtcctcttttctagctgatttgaactatacaatacatttttgttaagtatagtcagctactctgctatacaacatcagaacttattccttctatctaactgtatgtttgtacccattatccaaactctcttcctctccactcccactctctgctcagcctctggtaaccatcattccactctctatctccatgacattaacatttttagctcccacataggagtgagaacatgtggtatttgtcctttgtgcttggcttattttacttgacataatgacctccggttccatccatgttgctgcaagtgacatgatttccttatttttatggccaaatagtattccattgtgtatatgtaccacattttgtttaccatttcatctgtggatggacatttaggttgatttcatgtctttgctatggtaaatagtgctgcggtaaacatgtgggtgcaagtatctttttgatatactgatttctttttcattagataaatacccagtagtgagatatctggattatattgagtcttatttttagttttttgagaaatctctactgttttctatagtggctgtactaatttacattcccactcacagtgtagaagagttcccttttctctgcattctggccagcatctgttattttttgtctttttaataattgccattctaactaaggtatgatgatatctcattgtggttttgatttgcatttccctgatgattagtgatattgagtattttttttcatatgcttgatggccattcctgtgtcttcttttgagaaatgtctattgacgttctttgcccactttgtaaaagttttctttttaattgttgagttgtttgagttttgtgtatattctggattttctcttactagatgaacagtttacaaatattttatcccattcaacaggttgtctcttcactctgctggttgttttctttcctttgctgtgcagaagtgttttagtttaatatagtctcatttgtctgttttctcttgcctgtgcttttgaggtcttagccatcaaatctttgcttagatcaatgtcctgaaatgttttctctattttcttttaatagttttataatttggggtcttaagtttaagtctttcatctaccttgagttgatttttatatatggcaagagatagaggtccagttttattctttcgcatatggatatccaattattccagcaccatttattgaagagggtgtctttttcccaatgtatgttactgatgcctttgttgaaagtcggttggctgtgaatatgtggatttatttctgggttatcaattctgttccattggtctatgcgtctgtttttatactagtatcatgctcttttggttactagagccttgtaatatattttgaagtcaggttatgtgatgctcccagttttgttgtttttgttcagggttcctttagctattcaggctcctttttgctttcatataaattttaggattgtttttttctattcttgtgaaaaatgacgttaatattttaacagggattgcattgaatctgtagatttatttgggtggtgtggtcattttaatgatattagttcttctgatccatgaccatgcagtgtcttttcatttgtttgtgtccttttccatttctttcattagtgttttgtagtttttttgtagagatttttcgcttccttggttaatttttttcctagatattttttccttatacctattgtaaatgggattttcttcttgatttctttctcagccagtgcattattgggtatataaatgctactgatttttttgtatcctgcaactttactgaattttttaattaaacctaagagttttttggtggagtctgtaggtttttctagatgtaagatcatgtcatctccaaagagggacaatttgacttcttttccagtttggatgacctttattgctttctcttgcctgattgctctggctaagacttccagtcctatattgaatagaagtgataaaaatgagaatccttgtcttgttccagttcttagaggagagactttccgcctttccccgttcagtataatgttagctgtgggttaatcatgtatggactttaatatattgaggtatgtttcttctgtacctagtttgttgagagcttttactatgaaacaatgttaagttttatcagatgccttttctgcatttattgatatgatcatatggtttttgtttttttctattgatgtgatgtatcatatttattgatttgtgtatgttgaaccatccttgcatctctgggatacatcccacttgaccatggtgcattatctttttgatgtgctgttggtttcaggctactaatattttgttgatagcttttgctgaacaaaatactagaaaacttatattcaccagaaatattggcctgtatccatgctgaactgaagtgatgttcatcaggaatatcagcctgtagttttcttttttgttgtgttcttgtctgattttgttatgagggtaatgttggcctcatagaatgaattaggaagaattctctcctctttaattttttgaaatggcttggtgaggattggtattagttcttctttctaagtttggtagaattagtagtgaaaccatctggtccttgacttttctttgttgggagattttttttcctatccaatcttattacttgttattggtctgtttaagttttcagtttctttctgattcaatcttggcaggttgtatgtgttcagaaatgtatccatttcctctaggttttccagtttgtaatagtctctgataatcttttgtatttctcactcttctttaagagcatcttgtctgtttttgactctgcatttccatacatattttagaatcactcaagtttcacaaaaactttgttgaaatattgaatgcatctgcattgaatctattgatcaatttgaagaaaattctacctttgattattaagtttttcaatccatgaatatatctatccatttattttggtcttcttttaataatattttgtagtttttggtgtagaggttctgcacgtattatgttagatttatgtccatattgtaaggtatttttaatgctaatgaaaacagtatcacttaaaaattttgatttctattgatgtttatgctgatatataaaactaaaattctatattgaccttgtatctagcaaacttttaaaactcatttattaattctaatgacttatttccaaattctcttggaaattctgtgtaaaaaaatgatgtcatctgtaaataaagttttatttactttttcccaatcctttaacattgcatttcatttccttgccttctttactaactaagactgccaattcaatttcagacaaatgcggtaatatgtggggcttctttgtcttttcccccaacttcaaatgattaaattttaaagttttgacatgaaaatgtgtggtttactgtaggtttcggtagattccttttatcaatttgtaggatttataaacttcctctttatttctaatttactaagaatttttaatatgaatgttgaatgttattaagtgcttttcttcttttgtttaaagttatataaattttctttacaatgtaaatttgattatttgattgaaacaagctttcattcttaaaataaatccagtttgttcacaatatatattattgtcgtatatactgttgggttttgttttctagaattttatttaggattttgcatctatgtttatgtatgaaattgacccataattttcctttttaaataattttctagctacattttggtatcaagctttcttttcttttatctgaaaagcttatgtaagagtggcatccttttttttttaaatgcatgttagaatttgctgataaatccgtctggcctggaactttctttcttttttttatttttttatttttggagttgtcctttaagaggtctgagatttttcaatcaatgtctttaataattataggagttcaggttttgtgttttttcttttgacagttttggtaaattatattttccaattatgtatttcaactaatttttcacatttattgataggaaattgatcataatattctattatccttccaatgtctacagcatctgtagtaatagccccctttttattgttgactttggttattttaaccttccctcttttctctctgtaatcaccagtgacttacacataactaatcttttcagagaaccagatttggttttgtttatcttctctaccatattatttacaattttctcaattttgttctcatttgttatttttcttcttctttctttgggtttttctaactttttgagattgatgcctttgcctctttcctatggaagctcacccacagaaacagtaacattattatgtgctccacttcatatttactcttctgttttatttgcagaaccaagccttgttcaagttagtattaaaatataaatgactcccacagccatctctttatgcagtgccataaaatgtgctctaatcagaaggattttatattacgtgtttttaattattcttgtgaatcctcaatgcccaaaatgaattggcaacaaatatttgtctgtagatgtcaagatatttcctcatactgatatacttctcagcataacctcccatttagtttctttgctccttgctcctttcatgctgaaacaaatcctttacccaatttcccctacaatctgaatattccctgtttttggggaactcaactcaaatttcttttgtcctagtttctttttttttaacaagtttcacttgttatcttactaacagtgtatttaataaagtcgatgctcaataaatactcttgtctcaatgaataagcttcaacctctttgtagctatattaatatatttatgtattctataaagtctaattggtagcctattattattatttttttttttgagacggagtcttactctgttgtcaggctcgagtgcagtggcatgatcttggctcacggcaccctccgactccctggttcaagcgattctcctgcctcagcctcctgagtagctgggattacaggcacacgccaccatgcccagctaatttttgtatttttagtagagacagggtttcaccatgttgcccagggtggtctcaatctcctgacctcatgatccgcctgcctcggcctcccaaagtgctgggattacaggcgtgagccactgcgcctggcccgtaggttttaattaatatatttaaattttcttggcatttcagtatttctatattataatgtgaattattttaaaatactttatctgattacaaaggtagcacacacttgttttatcctaaattttctcaactgtttgacttgaaaagggggcagttactccatgatccaaacctcaaaactgaaatttgtattttaagatgttttctctgcatatgctaatatacatatgtgataattttctaaaacttattatactttgaatattttctatgcagtacattaatatctatctcattcttaatactgtgtagtataattattcaatatctgattgaaagacgtacagtgtattttcatattttactgttactgagcagtgtaatagcagacatcctttgtacttataactgtctattgtgagtatttctaaaaaatagatttctagaatatcaattgcggagacaaaggataaattattttattcccattatacacgaatgtcaatgctttttcctccacattcttgccaatacttcaaaatattacattttttcattgttgttatctggctaggcccaaatattgtgtggtggtttatttatttttattttctttaatctgttttcacttttcttggatggtttacacttatggatagtaaactcctgtgatggtgactcgtggtcatccaggttcttttgcattgtgtgggttaggatgggcaggacacactcttgtatatgtaccagctgttggtttatgtgattttttcaggtcaatctatcccatctgacaatataccttccattaggctgacagtctgtcatgcacacagtgcacacacacaattatattacaaggctgataaaaccgaattgctctgttccagtggttctcaactgggacagtttttggttgcacctttagggacagttggccatgtctaaagacagttttggttgtcataattggagtctgcgaggtgttactggcatctagtgggtagaggccaggaatgctagcaaacatcctgccatgcacagggcagcccccacaacagataattaaccaacccaaaatgttgatgctgccaaggttgagaaaccctgtggtctattgctgtgacattttagtgcttctgttgtatcacaagtgtaccaatttgtgttaattttaacacatttattcttgcttaaaaattgggatgtatcttaaaattgattgattagaaagtattacggtgaattttcattggcagaattgttttttctttcctagtgatactttaaatcatgatgtgctttacatcttaccacccaaagtcttagatttgaggaaatatgatatgattgtgtcttatcttttatccctacatatgtgcagtctaatttcagtgtaggaataggaagtctcgtgtagcatgacagtgtaattgctgtatttgtaggtattaaacatcaatcaatgcctagctttgtacccataggcattccactttgtgcctgctctaaggcaaaacacaatattcaatgctggaaataatttcatatttagttttatgttaaagtagttcctcttagatttagtaaatagacaaaatattgattgaatgttcaaatgtagggtggaatgattgatttattcatttgggaggttgtgaatcattcctatatctattgattttgttcttcatttatattcattacctttaaattcaggaaggttattgaaaattcagggggaaacatttgttaggttgctaactccttcacactaaaccttctatgttttcttacatttacaagcagtctaataatccagtgaatcccttacatactgaatgttgggaaaaggtcatgacaggaatatctagttttcaaatcttggtttgttaaagatcagaaatcttccttccagatcttggtttgttaaaggtgatgatcacctaaactaaagcatactcagatgatggctgcttgatataatggagtgagcttttattcctggctcttataggagaaaatctgtaagtggtcaggggaaaatcgatttcaatgtgtactgtcaattcctttttttgcatttgtaagtgagaaaaaaattaggtggttaaaaggtggcagttttgagttattaagaatgatatggattagcctcaacttccatgggtcactacgaggtagccgctgatacttcacatctggttttggtttgcagtaactgacaaagaagcacaaggtatgtatagccctattgttagtgtcgttccactcttttaaagacaaaaagctccccactccaaaagtactgaaatattttcaactccaatttacagattaggcaaaacctcttgagttaagggtcactaaaggcagctgaaaaatttctttgcaaacttctcagtgttctggctgttaaagaaaaatagtaaaataaaaagagctccccagtgtaagaattccatgaaacagagagtgacgtgtgagacgcattaatgctttccattcctgatgaaaagctcgaacagctttaagtaatgtggaatccagtatctcaaatcctagctccgtctgggaggtgagttttgggtgtcctagctccctgggattggaagagcaacacgttgtctataggcattccatatgtgagtttaattatgataacttgacttctttaaagaagctttttagatgtttggggagaatcccactcaggactgtggtttttctttctcctgctttctttggggaaggagcacacaggaccatggttcccagaaacggagacacactctgtgaacctgtgcacgtccctgtgcccacagcgaaggcccctccagtgatcagccaggcccaccattgcagccttccagatggctctcattagagtcaaaattgactgagggaagcccctggggcgtcctggaagccttagagaccatgctagggacagagcctctgatttctaggagctaatgtttcagagaaaataataacagcaccttctaaacactagagcttttctctttagtaactcaaggtaatgaatccccaccctctccctctgcttctcatttaccacccctatttctctgcaagtcacaaaggggaaaattgaagttttctcacatctccttgggaaagtaatctgaggttgatgggctgagatgtttccagagaatgggaatggggtgccaacagcatggaggagcctggggagctgctggtatcaggcatagagtgaagaccaaagttagggatgggagaggagggtatctactctcatggggcaaagtgaccctgaggcacctctacatttaatgagcctagaaagaaaaagggtggaaaagaataggaaggaactgttgatgttcccttcttatgtcctttctgttgggtcaaaatactgttgtaattttggcatatttttctctctatccaatatgcaagttgtttgtttggctgaatactgcttcacttcttttctgcacctccagtgaccgacaatgcttagcacataggcaatgccaatcaagattgatgaatggatgaatgatcatacagaaggaatattttctgctgtagcaacgttgcaaaagtttcttcttaaggaatcttctgatggtatgccgatgcccggttgctatataacaactcactgcaggactcagtggcttaaaatcacaatgatcactttattatttagaatctctcatggttccagggcttgattgggctgagatagatattatttgcttggagtctcttataggtttgcagtcaagtgccggttggggctggagtgatcttggtttcttcatttatacctctgggggttaatgctggctgtgggctgggactgatgactggaacacctacaaatggcctcgtcacatggcttgggctttctccccgtatggtggctgaggtttaagagtggctgttcccaagaaaatcaggtggaagctctatcacctttccaaggtagccttggaagccacatagctgaacttctgctgtagtcacagcccaactcagattcaaggagtgggaacgtggacctcactttctgatggaagcaaagtcaatgtcactttatagaaggttatgcatgatgggacatcctactgggccatcttgggaaatacagttgccatggtggtatggcaaatgtctagaaatgcaatcaatataccattctaatggtttctgataagtacgtgtgaaaccaacccagttgcctaaatagtttggctggaaataattttaatcagagttactttggaaaattacaaggactaagttgtatacaaatgggagctcttattttatattgaaatccagataaatctgctgtaaaataatcatgatgccagcaaaatagaggatgtatactcatccactcatccactcattcattcattcgttcttacagccggtattttttttttattgactatccacttgcttacaggtactattagctcaattattgagacggaaatcccataagatacagatttgggaggcttcttagagaaaatttaccttcctcactgcccaatgactcaatctaagaagacagcttaaaaaagccacttccacagctcacagggcctgcagctagacttgggagagaggtggtgacagtggggagaagaggggtggggagcagatgacctcctgctctgtctctctctctcatctgttcatagatatcgataccatccattgtgtgtctgtgtttgcctgtgtgtctgtgtgtatatatgtgtgtgcatgtgtgtatatgtgtgtttatatgtgtctgtctttgtgtgcatgtgtgtttgtgtgtctctgtgtgtgtgcatgtgtgtgtgtctgtgtgtctctgtgtgtgtgcatgtgcgtgtgtgtgagagagagtgatgggggagccactggttcctcacaacttaagtcccagctgtcatcttaactttgtggatggtcagcaggcagtttaaaaacaaatgaaggcactgatgctgggcacgttctgttcagaactgagggactggctggtgctttggccacagctgggcctggccacattcctaaagaggagccacagctggctggactgaatgaaactggctgggcctgtcccagttccctcctgtcaactgctgttgagagaacctcacccatcccaggggagtcccaagttcaagtcgaactctgggctcttgaagggctctcctggactagccactgacacagccagtattgctctcccctgatactcctgggctctgtggccggcttcattcattcattcattcattcattcactcattcagtaagtgcttgttgagggccatcactgacacagtcatgagggaatcctggggttcccctcccagtgtcagcactggggctccgggaagatggctgccttccatctccaatgcattttaatttcttctttgaacaaacctgcaaagttactggttgattgaaaaaggaatattggcacaaatgaattaaatgacgcatcggggtcaccgagcagttggggatgaagccaaggtccctgttatcaggatgctgcatggactcttcccttcggagaaatatcacgaaggctccccgcctccagcgcgcgccagtggacccctcctgtgaagcagaggttagccctgcactcagggtcctcagttcctacctaagccagctcatcattagcaattcgtattgtgcatgctggcaatgcagagcccaggggcgctttttgtcgagccagcgtcttttatctgcagttgcaccccagcgaagctgggaccggaatgtacgactgttacagggtccgggcctcctcccatctagtttgcaatgcctctcacatgcaaaggttatgtttgtttccttttaaaaatagcagacgagcaggtgacacactgccttaattatccttctgtagaacacattgaaaactagcctccctgttctactggcagagcgagaggaaaatgtatcctaaaccgcagtgggtgaagcctcttcagatgtcggtcagagccttacccacacccagccccgcccgacagccgtgaacacagacaaacaactgtcacccattgacctcacgattccttggtatatgaaccaaagtggaagcggcgagaaaaggaaatactgcagatatttttaagtagaagcaaaggcaggaagaggaaagttgcaaaattggttatatttctttttgcttaagtgcataatgtttggatgaccaaaaagtcagtgtaaatgtataataagattattttcaaggaaatctgtatattaagttttaaggcctattttacttcatatatacataaagtaccatttttagaagtgctatactccatgcatattccaaaatactacacgttttttttgagaaaggaagggaccgtgaggcttttttcacatctgatatattacagtataatccatattcctcctataacacttagttctggaaaaggatctactggtgtctgagtttaggcaggcactagcactgacgtcagtattgtgtacagagaaaacaaacatactctacatttaccgaatttgatgcaactcacatttgggaacatattgaacaatctaaaattattgtaaagtggtaaatttttcaggctttaaaatcattaacagtggcataaaacaattatacaatttccatggacaaatctcacccccccagatttatgcctttaatcttatattcagatctgtgtaattcatgtttgctcctaaaacgtgtatttctttatgttctataataatgaacaatccaaatttttcaaaaaaaaacaccatttctgcattataaatgttagatcttaattttaacaagtaaaaaatgagaccactttgtaaaataatgtcaattcaaggaatttaaatcaagaattaggcacactagtattctctctaaaggcctttttgaggggcatttagcaccctctagtgacaacaattcaagccgttcaaagggaacttccctgcacgactcatgtctggtttctagctggcaagtcaacaatgcagtgtagttctttaggcaggaggtggttgcttcctaaaatccttgaggcaggattatttttgtagctgtaaataaaggctggaataatctccaccaggcaaccgcgcagtgggaaaaccatgatttatccctatcggctataatattctttggcttatcatggccagtccactcagaaagaacatttctagtactccttgaacactgcagcctttcccaaaacatgtgctgagatctgtgtgggcatcagatgacaacaacaaatttactgatatcatcatttcagttcaggtcggtgcatttaacgggatttaacacattttcataagagtgaattggaaaagaactggcctgccttcacttcagctgcacctctgtgtcctctgcgttgcttgcagtgggagataatacagtgtggagagggtgaggtgtggagagggggcgagggatgaggagggctcaggtggagaggataccatgtggagcgtaccatgtagcagttactgcgctgagacagactcccagtgtcctgtgctcctgacttcaggcacgggtatagggcttcattgcatccgcaggtagcctggtgatactcatgcaaatataaatgaatttgtggcaaagattttttgccttcgcttcatttctgattccatttgtgatggaaataaattagtaaataaatcatcaaatgaggtgatgctgaattaaagcccacctcaaccgaaaactaaaagccaactttagaaagcagcaggaaaaattattaatgcaggcttctacatcaatttctatcaattgaatgctattatagtgccacttatgatctttctttaagaagtaatctgtattttctttaaaaataattcataaaatagtgacagattaagacaaaaataagtgatgctgtttagtatcttataggtgagattgacacacttcttaaaaaatcatttaaaactctgactagaatcaaaatcaaaattaatttcaacaacctgggataaattctcaatttggccaaggatggtgacaggggacagtacctgggaaaggatactttggatctgagtcgggggtagagtgggatgccagtcagatgcttttgtgaatcttaattatatgccctgtgggcatacgaagccttatgggcaccaatggcaacgtgatgtctgtagcatctatgctcagatatacccagttatacggacaaagaagttgaaactcatttaatggtttccaaattatatggagaagcctaataattggaacaatacatttaaaagttattttaagctaaataatggtgacaaaataattactctcctcttaggtttctttcttaaaaccacagataatacattgacctatttggagtccttgataatggttttaatattcctgcatttttaaagtcatatggagttgagtaagagcaaaattggcctaaacttgagaacgtgtgggatgcttatgaaattgtgtttattgaaatcattgctccatgggagcttatagaactgaactgacgtgtgcttcagtattaaggaaattgcaacttggtgttgagaagttgaggatttggtatgtgataacagtttccttggtttctattagttcagatcaaccaagagactgaagaatacattcaccacttagagaaagtgttgaaacaatggttatttaaattgtaattggattatttcttaatgtgctgctgggggatatggcactcccctacccccccacacacacaccctcatacacacactcacacactcatacacacatactcacatagttgtatccaatggagtgaagctgtaatcatgaagtatgctgtgaacagaaaaaccgtccttaaacagcgctgactgggtgcccttgagggctgagagtgtcttcatgccgcgtatgttctcaggcaaatcctccgactgctgcagatggaaaagttccatggagtgctggagttttccattgtgcggcagccccagatgcttgattcttatctacaatctcaggcatgttcctggcaaaaacccctgggacatcgttcttgcggggctctcatgaataatccaaacactatgcattttaaattcatgtgtcatcttaaggacaatatacagcacttttgtcctattgttttgtccttaaaaacctgcgtttcatgggtcgctcccaggctctgaagttttatgtgtgcagaatttgaggagactgagataggcttcccgaatgccgagacatgcggtgactggatagagccctgtaatcctggcttcctgagtgcccactggagttcctggcaggaaaaggccattaatatcacctgaatggattaatgccgcatagatggcctccacgaaactcttgagcgtttctgggttttcttaataaaatgaaaaaaaaaaagagctctatgcttgctgtagacatttaaaaaagaacaggcatttgggcatgctaaaaggtttgacacctacaagtattgtgggctgcactttttacagaacatgcctgtatttttcagatatttacaaaaatgaacaacattgcatgttacttacatatttttatattaggatataatttatgtttattacaaatttatgttttgaaaatataagtgaaccaaagaagaagaggggaaaaaacaaaaagcttctctgccattggtattataagatatagctgtcaatatttttactttgcctttttatttattttttattttttgactattacaaaaggttattggccgggcgtggtggctcacgcctgtaatcccagcactttgggaggctgaggcgagtggatcacaaggtcaagagatcgagaccatcctggccaacatggtgaaaacctgtctctactaaaaatacaaaaaattagccagggtggtggcgggcacctgtagtcccagctactcaggaggctgaggcaggagaatggcatgagcccaggaggcggagcttgcagtgagctgagatcacgccactgcactccagcctgggcgacagagtgagactcaaaaaaaaaaaaaaaaaaggttatttaacaaaaagtctaatatgaaaacatacatgacctaatttttacatatagtgaaacaggccctttggagaggggacatgggtttttctgttgaacagccattatttatactcattccaaagtttctaatatgatgatactatttccttgtattaccaccgttccaatactgttctgctgccaactagttgacatctccacacattcatctatgacaagattcataaagggatcgagtccccataatattccttggacatgtctgccaccattgcatttcatttttcaactcgggaaggttagcttcgctcatggtgtctattcctcaggttcacagatgctttggaacagaatgcacggccatccccaactgcctttttatttttaacaaaatgagtctatggatataattctcctatatactgtgattttttaactaaccaggtaaaatatcagagcagttttccatattgctaagtgttcatctacgacatcattttcctgcaatgtttttgaggaggaagggcgttccattgtagggatgtatagggcagggataaagacgtgaatgagtcatgagtgaatcttctgttgtgtccccacagatgtggaggttcagacggatctcctctctttgctctgcgcatgtattacattgagaaccatgtggctgtcattcagagtgttcttagctcctaaccttcctccccatattccatacagagaagttagtaagggaacaagaatgagaacttgttcgatctttagaaaatgggaagaaatgattttaggataaataaatactagtgtttcttttattgtgacagtgaatttatggtatatttatgttatattattttgtttctttctttggagtaaaatgtgaggagactagtggaaggttttggcagattcacaggggatgggtttgtggcagagaagcatgcaagggaaatgtgtgctttattcataggttctgctgtccacagctactgtatgggctgtgctggtctagtgtggtgattactgcatctcaaggagagtgaaaaaggaccctgccctgataggctcatggcaggacgggcctcaggtaggggccgtgtgccagattgccccctaacttggtccgcgtggtggcttggagggcatatttccctagggagaggaggtatcaggtgggaaaggcagcctggttcttaggctgctgggtggtgtagggatgaggccatttaataacatagacttggggtacaagtgaggaaagctagagtgatatctatatcttcagataatttccccataggataatatttgggaaacggtttctgcactgctatattctagttaatagatgtgccttggccgggcgtggtggttcacgtctttaatcccagcactttgggaggctgaggcgggtggatcatgaagtcaggagatcgagaccatcctggctaatatggtgaaaccccgtctctactaaaaatacaaaaaaaattagccaggtgtggtggcgggcgcctgcagtcccagctactcgggaggctgaggcaggagaatggcgtgaagctgggaggcggagcttgcagtgagccgagatcgcgccactgcactccagcctgggcgacagcaagattccgtcccaaaaaaaaaaaaaaaaaaaaaaaagatgtgccttgtcctatcaagagccaaagatttttttaaaacactttacattaaatagtcagagattaccaggcttggatgctatgatgccatttgaaacatcaagaattattctctttgaagacaacaggaatcaatcaaacattttgtcattagaaatgaggaggagtttcctttgtaaaattttggaacagaatttaccactcagtatccccaaattaactttttattagatcactttttatgtttgtatgcatttccaaaattagacgcagtaaaacttatggatcgaatattgatcaaataatagcatctgtttttctcttttttagtatccaataaataaatttgtctcttataaaacaatatttttattagttagaaaatgatggatatatgcatgcatgtatgttatacataaataaatatgggagagagagacagagattgagagagagagagcatgtgtgagagaaagcagagaaaatgatgtacattggcaccagtagacaatcagagttaaccaggcaaagggtattaggagtttggtgtattatcttgtggcttttctgtaagttggaaattatttcaaaatagagaggtaagaaatcccactcttcacagtttgatttgcattaggcaagaaccagggagttaaggccaaatcatcactgaagcattaggtcccagtagaaatgctgatctttcctgctgcagggaacaactgagggctggattagcaaccacgaggcgtgggtgaggcgggaccacacaggattttcttccgtggctatttcattagcaaagcgttcatcttatttaaagctggtgtttggtaaaggcataatcaggtgccatgtgttgtggaggccacagttaacattttacattgatgcttcttaggagagaacaaaaagcaaggacactcagggaagctgagagagcttttctcctccgcactccagaattctagtggaagctgcccagataaaacagctcaggactttgaaattttcggggaaacagaattttaatcagcctgccatcttattcattgttcagagatgaaaagagcggaaatcaacaccccctcataatgtaggtgctgagaacttaggttctgatttccacagaatgattttcttacaatatactctctttcttttcttttccttctttctttccctccctccctccctttctccttccttcctccctccttcctcccatcctccttcctttctctctctcttctgtccttcctttctccttctccattttttctcgccctcttccctccctcctcctcctcctctccttcctctccctttccccccttatctttctccttctcctccttcttttgtcctaacatgaggtgataaatcagaggtatataataaaagccagaatgacctgggctggtggacagaactctgacacatgccggcctaaagtctgagtgaaatccatttactgaacgtccagctctgcaaccaggaattgtcagatgactcaggatttagtctattgtgttcttggggtcgcctattgagaccacacctctttatgggtcctgcgttcctgtagctagattcaaagcaaaatgtttcttccaagcaatttcctgaaaatgagtaattaaagtcctgaaaccctctaaggaatgttcaggcctgcattcgctgtacttccttcgaggagaaaacagacctgtgaccctgaacttatagcttggattttagacatgtaatggggccctcacatggcatctctgggtagccaaaagttctatgaggatctgttgtctgcaacatggatgtctgtcagagtgagaccagctcactgatattccgggacatttgtagtcacttcagttatttgggttttaataaatacttgaaaacaagacttaggaaggtttatttttcctctttattttttgtgtttactgtaagcctagagtccttgcgttttcaacaactttgttgtagagcaaataaaaagtgcaggtatttggaaggagaaaatgaaactgttctggaacacttatatgaaatgttgaataaatataggttgttaaaaatcagccaggcaatggctgttactgaacatggccatctattaacatgaaataaactccacctgcaaagtttccttttaggagaaaggagctcaagtcctctgtcctagtaattctgcgaagaattgggctgcgaagggctgacacccagggcagtggggtgccctcaacgccttggctccaaggtgcttgcagcccgtgtgaagccatgcggagtcccatcacatctgcatcctgccttggtctcagtgcagtgtgtcacacggcggcacaccggtcacacctgctgtggcagtccccatcccaattgatgccttttctttttttaattaaaaaaaaaaaatctcctggctgcatatcatcaagaaaaacaacattgttttcagggtctcttatctctccactcccaaatatcctgtttctttgggctggacagccaggaccaatagaaacctcttcctgccattggctgacttcatttcccagacttagcacaatctcatccgctctaaacaacctcatcaaaactactttctggtcagagagaagcaataattattattaacatttattaacgatcaataaacttgatcgcattatggccagcactattaaggtaaggaaagggttccttttaatttgacaaaatcttgttcttgttactcttttctttggtttcctttatcaaggcagataagttagggttgggcaacacccccactgccacaatagaggacaacaagatttcctttgcactgcctagtaaatttcctttttcctactccaaccatccgcaaggcttaaaaacttcaaactcagaaaaaaattggggtttctaaattcactgttgagtgctgtggattacttttggaaaggcttttcggagcgcttctgaattttcagattctctaactatccctaacggtgcctggatgtgtgtctgagaaaaggcagcagactcggagaggttgaagggtcgggtcaaagcaaaagatgcgtttgtgaatgtcagacatttggaggctcttcagtggctccttagcatcagggatgccaggcagtcccagtggaagcgaagagatactcggcaagtggctgctggtaatgggacgcaaatgttgacttgatttgtgggacatccacgctgagaactgagtgctcacgtaactcaaatgggggtaatttggtttgttccactatatgtttatcttcaataaaatacctactgtctgtgcactgtgagtaagatttcttccagcaatggttaggtttgcggagattggaaagcaatggccggtcggttctctgtgctgtggggtgtttggtctgatgcatttccttgcctaagtttttagtagatagcatgtagagattaatgtggaggtaaatctgcacaggtacaatcctaaatatggcctgattcctggaaatgaagccaatttaatggtgactacaagtcaaggggcatgcagtcttgaatgggggtccgttcagttgttttaaaggccaccatgccttcgtgacatttgtagaaatgtgaaaaatcagcaacaaaagcagatgctgagtggagggaaaagaaaattgtgtttgttgcatgtctttagttttgctgcacggaggtgagaagcatttggtggtgttttcataaggcttttagtttgttggaaagtgcataagaaaatggaagtttgcccagaattgggccaagccattttcaaaaatactctttggtttggtattttcataatttgaaatgtttgtattagaagatttgactcatatgtaccatagaaactgtgtttgagaagttcagcttttatttctcaaggtgtgttcaataatatattaaaaatctgtgtaccaagaactttcaccttatacttttctttctttggcttcaaggattggaatctgctgaaatatggctcctatagacaggaattataaaattgagagttaatgtgccctacttatagctacatgaatagaaattacttgattttgtgacccaaaatgttatttttttgttcttattttcatccttattcatatgcatgttaaatcaaatattctgtgtaaatcttgaatagcttgggtacgatcttatgtggttttttttcccaaaaaactcagtgcattaaaaaggacattgaaataacagaccatcctttagaaggtaggtacattttgcaaaacatccaaatgtgttatactgtttaatttgaagtatacatttatgaatacatgaagctattttgaaagtttgaatattttgtgattttctgaacacttttttggaaataatagtttacacttgtctaaggtactatgcttgatttaacattttattacattgcattatgtgtttattgtatgtacccaagtgaacccttagaatgactacaggtgaatttttttttaatcttctgttaaaataggccctctttataggtgacttcctttaagacatgtttctgttagatttcctgggtaaagtaatgagatgattttacagccttgtttatagagtggaaaaaggaggtcctgagtctgttgactacagtttcaattacgttagcgcaaagcccaagttagcatagggaaaatgatggctgtccactggaattaggaaacagccccccatagaggcaatttccagtctcaatgcactctgtttttttgttgtttcagtaaataaatcaattagtcgattaggtatcagatgctctgaattttttaagttggttttctgcatttgagtggagtttttatttttttgcattaacatttgtaagaccctatgagacactatgaaaagctaaatattcgtatccagtctttgtgattcttaccatcattttcccttggtaacttgaaattgggaacaaaatgtttcaattggaagaagtaaaggaattttgggaacttatgtgagagtgttcatttatctctaagtgtctgtgaattttaagatcagcttaagagttctagtaaagacttggaagcaacaaagctgatggtttgcagacaattcactgattggttttggtgcttcccttgggcattggtgacatctgacaatattgagaggtgctgaacctcaccggccccactgtccccacaaacatctcagtgtttgctacagactgcagggatcctgctgttgcactgaaaactcgattgtgcttcagttaggagttttagcctaatttcccaaagactttcctgattcctttttttttaatgccatctgcaatttgggaagtctagtgaagcctacagtcctttctcagaataatactttctggtgcctaaaaagaaatacatagaattacaacagaaatacagtcctctccccggaccttttaaggagaacatgaaccccaggttgcaagttctgatcctagaaagatacttaatgtgtaaaaagggaatgtgggggattttccatcatcacagagatctgacattgaaggatgtggagagagccagcagccggcagcagcatcaggggaaagcatcttaaaaatcagacaggacatggaaagttactaacaaggcttggtggagacctgagggcaccctagtgctatttccatgacttgcctaaagaagttacttttttttgaattaacagaggttggaaggtttgatggtaattgaaacacgacctgataggactcaattttattaatttaaagacataaagcttgcattatatacgccacgtctgcacatttgcacttcttgaacgtttgctatcacatgtgagggaaacttaattaagactaagagttatatgaagaaagttaactcctcacagaattttgatggatgtgattaatgagtttaatagctacagatttatgatttttcatcaacctgttggctaagtgaaatacgaattgcgtcagtccttgttactttagggggattccgggagaatggaaggaaggccaggggcaaaatgccgctgccctgctgtgcataagtcatttcagagcatgctctgagtgtttgtccttgccgaaaagtggctttacaggcaactactttaaaacaacttgctgcttccgttcttggtcagctctgtgatccaggctgccctctgtggacacagcacagttctccctggccctctgcctgtgtgtgcatgcacccatgcatgccaggcaccctgactcagtgaccctggaaagcaggattgagaatggctccatctgtgggcttttcttcccccatgaaatacagtgcaggactgcaatgctctcagacaatgtgctgagcctgaaccatttcttaattatctacgtttataagtgattatctcataaagtttttgttttgcaaaacagatctttatttaaacacaaacacaggttaacaactcttgaaaaagcatacataaaaataagtaaatgaaacaaccatttctgttgtcttcaggaaaatatgactgatacatttagaactttagaataagattccctctgtgggagtggagacccaaagccattataggcatcccaacaatttggcggatttattggtttaacagctgatacataagagaatcacagagtaagggccatggggaagccagacggatgagagtttctctgaaatgagaaacctcagagaagagacagggacagtctccaggctgttccagcgtttggtagcacactgtgctctggcggggtcttttctttggagctacctcaaggagagccttcttgtcccctcctttgaccccacaggatagaggacaactgctccctggcctggggattctgtcagaccacccctgatagcgcttctctcaccttacgtggccgcagacacacttgcatttgcttccttcctgttgtgaccctgggcaaggtagctagcctgtctgatctcagtttcgtcacctgtaaaatgggatcataatggctaccctgtctcgcacccatcctcaataaatggcagatgccatcagacgcccccccgcggatgtaaccttttctaccgtattgtctttcaggctctgcactcactcgtctcaacatttcccacggcccagcttcagctgtgaagcccacagccatagactgctctgatgtgcggcctcccacacccaggcagggtacatctgggtctgggcagccacaggacagggaaggaaggaggagggagcttgcaggggtgcttgttaaaggtgtagcagggcaggtaccacacacaggggcaggtggagcgtccaggggtcgcccgaggtggtgctggtcagagagggttggcttcgtcctgttctgagccgaggctgctggaggagggcagaggcctatgactgcatcgtgctcctggttagggcaggaacagcaccctggaataccccactctcctctttactcctgaattacaaaaaatacatcttgttctttagcataaattataaacataaaaaattcttatggtagagaaaacgtttaaaagtcatcacaaagtcaatataaattgttcagatcctaaccaaccacagcaaattcctaacaattgggatatgtctctccaccgtgtgtatctgtttggccttgtatctacctacctgtcctgctcttctcagttagcattgttttacaagcattttcccatgttactaacattttttgataagcaaaatttttgtttcattatattctatctaaaatatgtattaccattttataaccaatatcctagtgtataaagtgatgctgcttgcgatgtttcactcattatattgcagtacaccatctatttaattttttgaatactttttattagtattggtgcctagaaaggaattattgagccaatgggtatatatattttttaagtctttgccaaatttaaatatttgccaatttaaaaaataattaccagattattctctggaaggattataccagttctccctttttctagccacatatgagaccagttccacactacacccataacaactctgaatattttactctttgaatctttgccattctgacagataagaacagaatctcatttttatttgtacttctttaattttagtatttcattacatttttttgtttgtttgctgtgaacccattttggctagtggtccactgtgacctctggattttttttcttatttatacttttattctctgtttggtctagcttactttccacatatttcccctactgagcttggccaagacatgttttataaaatttcacatcgattcccatctgtccactctcccactcttcattttctttcctgtcagcacattctcccagctttgcttgtgtttgttgttgagtgtgaataatttatgtatacccactgatatcgcagaagctgtttttagtgatatcttatccatttcttctgtgtcctcaacagtgactggcaaagagtagaggttcaataagcacttgttgaaaacataaacttaaattttaattatttgaaatcataaagaggaagttaagatatcagagtaatgtaattatcattgtagacttcaaatagaattcttatgtttttagagacatttctcctagtaaaataacgttaattaaaattgacttaaattgatgtttaagaaagtataaaaaatgtagctgtagtatcttgaattcataatccaaactaacatcatcctaataactgcttgttatgtgccaagtcctgtgctaaactctcataatgtctcatgtgatcctcacagcagcctgggtactgctgctttcttacagataaggacaaaggattagagaggcgaagtatcttatacaagtcacacaaatctgtctcccttctctttatcatctgatctcttttttcctgctattcaccctagctgtacatagtgaattactgtgcagagaaacatgatgtattaagtgttatggagacacatgaaataattggataatgaaaattattatcgctggttactttatgttatctactcttctgggaaaaatcccataggcagcaattcttatactctaggtggctaatcaaaacaaagttctagaaaattcaagaggtaaaactctagcactgaattctatatttgctcagtgacaagaattctttccatatttggcgagatccaaggggcagtgcttccagattccagatcagctgctgatttaaatttcctcatcccaagtatcaacttccttgcactcgtcttgggcgtcaataatgaacacgcaggtcagagttttccataaggccttaacaagtctttcagcagggtgttcatggaattaaactctgggaagaacggtaatctgctgttgtacacagataagtacagagacattttgaaaagaaatgctaaggccaagcaaaatgatttatttttaaagtgccacatcagaatccaatcataacattaacctcagggctgttactttaaacacgtttggtaaaaacaatgcttgtcgaatttttgaaaatataataactttatgcaaagatcccgcactcttgcatttaacacattccactttttaaatccttctgccttgatgatttaaaatctcccttgctggtttttttgttttttaaatttaccaagtattgatacagaatcaagcactgaagacaggacccttctgctacctccacattcacattccccccaaggccattcattcagatcgtcagccagcagtgagtttctcatctccatgctctttgggtttcatcgggttttattgggtctttttttttttttttttaattttgacagtgtgcacatgatgctcacctttgaggaagaagaaactgttgaaacaacactttagaatctgtcaacacaattagtttgtgtctcaatttgaggtagatgtcccaagacattgctccaagttaaaaagaaaaaaaaagtatgtggttttgcattgcgtagtcctctttggatccatacgatatgtgtgccttccctgaccttccagagagcatcaaaaacatgaaggttgaatccagagagcacagcccacttttatctttggcccagggaggcacttggtactctgtatttcttcgtggcatccttaaaatagcctctgtggaaaagggattggccttatcttccgtgcaacggatgggaggcatagatatagctgctggcaaggggaagtggaaagaggcccatctgggagagggtggcccggagctttagtttgatgctgcaggacttccccaggtgaacgcacctctcctggccctagctcccttataggaaaatggaggtggtcagctccgccttctccacagtgaccatctgctgactgtgctgctgccaggacgcagggggagctaacagcagtgcccctatcggatcttcaaaccggggaggggtctcgtgcagtgggcaggggaaatgggctcccacctggcttttggggttcactccctggctgttctacttcctggccatttcacctttggcaagccacagcctcacaggagataggcttttccatcggtgaaatgggtagagtgatagttcctacttcacagggttatagtgagattcaccaagtcgcaagagcccagaactgtatatggcacacataagctcctcaatcaaagttagttaattttactattcattcaagccaaatacatttttcttctaagactaaaatcagggaatctatgaaaagcatttccccctaccttttttttttcaatttctacaacagtttgtgaattgaattttgttttcaattagccaatttgtccattttcctgtgatgaacatgtttttatctcttcattataaagtaagaactctgacagacacagtgagctcccaattattcacgagcacctgatctgcattggagattgcttaaaacagggctgggaaatgcttgctggtgagttcaccggacactgcacagcaggtcctggaaggagacattcagggcgttgttaacttctgtgtctccctattcttcttattctccttccatactctttctctctcattgcaatcgctatccacctggaaggcggcttgaaaaacacaaaagacaacaaggatgatgagggggacccctcctgagcctcttaaatgctgagggatccttcctggacctgtttttattcattccaagctgcctctcctagacaatcacttctcttaccccaggaaatctgggacggtgcaggtttgcaagcttgatctggaataaagaaacaaaggaaaagacggaccaggaggcttggcctacgccaggcaaaagtcagcaaaagcagccactacacatctccttttgagttctaacttttcactttgtcttgtgtgaactcctaaactggaagcatatttatagtcacgtaaaaataagaatattgtccaaggccaaatgtaagtgacttttatgagttattggactttgtgaattactcattctaccaacctgaattaacatagatagttttgttgactttaccttctttgtaagccaaacagtatgaactcggttaagccggtcttaggagaaaagacataaaatgtgtgttgctaggatagcattctagtgaaggaagccacttctttgtttcttgtgcatccctgtgagggtacctctgtccatcccaagagctgttttcatggactcactgttgaaagcccaagcctattgtaaccaattttgataagctggttacaaaataagcacatgtatacattttttaaagccttgttcttctggagatggaaaacatctttttttagatcacatgtttactgctttggtaaacagtaaaatgctgctacagcaattaccttgaggataaagggtttgtagacagatacttcctgcgttcacttcctacacagatagccagcccaaccagagacgcactgatgcaggaagggctcccagtggaaacttcctctctccgaatgcgtggtccattattcgttatctcctctccaaggggaataagcttgttgctccagattttctaggagaattctgtcttgaaacaggtaaaaatataaagtttctaaagtaatgattacagtacctcgttctcatcctcggtgtcatctactcggtgatttttaaggggacgtgattagactagaatagacttgtctatgagtaacatgccccgtaggcacctctgtctcctttgaatcatggaaaatgatgcataattcgaatgtttttatatttggtagaaaaataagtctctttgagattcaatggaaggccttttctatggttagttgaaaggtcattttagattttgctttctttagtcaagcagagattaccagatttgggtacaaaaaatatcagctcacagattgttctctgtgctgattttacagcagttactaaattccaacgaatgcattgtttaggccctttgaaccgaagcaaataaaaccacagtgcacacacactaaacaatagggcatcatcaattagccatctacaggatgtgtccttgcagactggcccctttgtaggagaaaaaaaaatagatcaagtcaacaaacaataacactgaacaataaactaaacaaaataaatagcacctgggagccccttaagcactggcgaagcaccaaagggtgatgtttacacactgtacacacggaaacccacagctccacccagatctcctgcaggtccctaaaatactcaaagaactcagcagccaatcattgctgggtcacctcatgttgaagggtaccccctttggcgatcagaaaatgctgagcctcttaaatgctgttttcattcactccaagctagctctcatagacaatcacttctctcaccccaggaagtctgggacagtgcattgcgaagggaagaaggcagtatctaacagagccttctgcctggcctattccataagtgccgatgactgccaggtggggggcagagattgcatttgaccccgagagactgccagacatggtgagatgctgtcatgtctcacgtagatgttattgcacgaatatattctagtgattttatccacatattcaatatatgtattttgtatttaacatgaaattgaattgaagtgaaattgcccaaagagatattttcctttagggactcatttcttcacatacttttgcttatcttgttggaagacacactatgtcaatctcagtatcctgtttgaatgaagactgctttcctcctatgtatctgttgcccctagacagtcattgtgcagcttgttacctttctgtgaaactccatgagacagctccagcattcatccttacaggtgctacctcctgacacttctgcttctttgcaaaatgacttccctgatctcctgagtctgtattgtttccagtgctgcctgaaccacatttgggtgatgctacaggaccagacagcagacagatttgtcatggatgcctgatgggataggaccctgttggcatcctctctgaaaatctcccttgcctggctagggattgttttattttattttctttagcctgtagcaaatacaggttcagtatctccattgaataatatattgtagaaagaaaggcagtaataaaaacttcgttctttttccccatttgaaaaacaattattataggagtttagaaaataaaaattttaaaaacaaaattaaaataattgatgttacaccatcaagggtctttgaatactcgattcttttttgattttttttgtctttactcctgtaccaatgtatcctttttaaagaataataaaatttgagaaattaaactcattgttattagtacctttctatccacttcttttttttttccaggatagtgaaaaaaaaaaaaaaaagaggagtgagggctgaacttgttacgatttagaaattaaggcccattttccttcttaagaacccagtttctctatatgaagcagatccagaccgcaggtccctgtcccaccacgcctttcacttccctgtgcctcgtttcctcatctgtagaagagagtcagtcatgataataactcctacttcttggtagtgttgcaaggattaagcagcttaatacttgtatgtgctttgaacagtaacgtgctgtagtgtacaaaagatgtaaattgcagaccaggcatgctggcagctgcctgtagtttcagcttctcgggaagccaaagcaaaggatctcttgagcctcagtatctgaggtcagcctgggcaacctggcaaaatacctcatctcataataataacaacaataataataatgttagctgttatgggctgttattggttacttatcctagtcacagtcttcttatttaatttactctcatatctcaattgtttttttgaagtaatcaattatcttccttgattgtgtttgtttccagtatttgtctttggaaaggaatcctgcatttatacctggttatttatagcttcttctaaaggggtgaaagtatttccctacacagtcatgcatcaccatgcccggtcagttctgagaaatgagttgttagatgatttcatcgtgcaaacatcacaaagagcacttacacaaatgtacatggcatagccggctgcacacgtaggctacaggctataagtgtagcctgtgctcctaggctacaaacctgtgcagcatgtgaccaggctgaatactgtaggcaattgtgacacttaacacaatggtttttatgtatcaaaatgtgggaaaggtatagtaataatgcagtagaggccaggtgcggtggctcacacctgtaatcccagcactttgggaggctgaggcgggcagatcacgaggtcaggagatggagaccatcctggctaacacagtgaaatcccgtctctactaaaaatataaaaaattagccaggcatggtggcacgcacctgtagtcccagctactcaggaggctgaggcaggagaattgcttgaacctgggaggcaaaggttgctgtgagctgagatcatgcctctgcactccagcctgggctacagagcgagaccccatctcaaaataataataattattattattaagaagggaaaaaaatgatacacctgtacacctgtataaggcacttaccatgaatggagcttgcaggatggaaagtggctgtggatctgggtgaatcagtgagtggttagtgaatgtgaaagcctaggacatcactatctactactgtagacttataaacactgtatattggccaggcgcggtggctcatgcctgtaatcccagcactttgggaggccgaggtgggcggatcacgaggtcaggagatcgagaccatcctggccaacatagtgaaaccccatctctactaaaaatacaaaaattagccgggcatggtggcgcatgcctgtaatcccagctacttgggaggcggagggaggagaatcccttgaaccagggagttggaggttgcagtgagctgagattgcgccacagcactctagtctggtgacacagcgagactccatctcaaaaaaaaaaaaaaaaagactgtatatttacactaaatttattaaaacatttcttcaatagtaaattcatattagattactataactttttttacttattaattttttaaactttttgactcttttgtactcacttagcttgaaacacaaatatgtggttcagttgtacagaaatattttcattctttatatccttactcaataagctttgttctattttttttttaactttctaaactttttattaaaaactaagacacaaacacatacattagcgtaggtctacacagggtcaggatcatcaatatcactgtttttcatctctacatcttgtccctgtgccactggaaggtctgcagggacaataatctgtgtggagctgtcatctcctacgataacagtgccttattttggaatccttcttgaaggacctgcctgaggctgttttacaattaactttttttttttttggaaatagaaaaagtacactctaaaataatgatgaaaagtatggtatagtaaatatgtaaaccaataacatagtcaactattatcattatcaactattatgtactgtacagaattgtatgtgctatactttatacaactggcaacacagtaggtttgtacaccagcaccaccaaaaacatgtgagaaatgcattgtgctacagtgttactacagctgtatgtcactaggccatagagatttttcagctccattataatcttatggtaccctcgtcctatctgcagtctgtcattgtccaaaacatcattatgcaactcctgaatgtatgctaattgctttgttctcatgctattcctttgaggacagtagagaaaacataagagagttacaactgttattccatttggtggctcaactgacatgttaaccaaactttcaacagctgaactcaactgcatttttgtgagcccagaaaatcagtagttttgataatttaaagttggagaaatgaaggacgttcattgtttcctcccattcttatgctttgggtgatgctgttaaataaatgaatgtgtttgtgcaatggggagagaccactgttctctggagtggatctagaggttaaaaagtcaagctattttgaaccaactacttagagtggcacattctttaggggaggtgagcagggatctattgaattatcatattgctggttaatcatgattaagaatctatagaaccccgaccgggcgcggtggctcacacatgtaattgcagcactttgggaggttgaggcgggtggattgtctgagctcaggagttcacgaccagcctgggcaacacagtgaaaccccatctctactaaaatacaaaaaattagccaggcgtcaagaccagtaactcaaaacgtgtgttgttaaagttctatgccttaagttctgtggctgttgtcatgtaacctttcagtcatgctgatggtgcctattaaaaagcaggctatcagtaaatgtccatttcataaatgaataaataacttcctgcatgacaaatgcatgagtgagtgcatgaatcagtgatgtggctggcaccctatattaaaatcacaaagaattgctgttttttaaaaattttttatttttttgagacagagtctcactctgtcgcccaggctggaatgctgtggtgcaatcttggctcactgcaacctccaccctctcccggggttcaagagattcccctgcctcagcctcccgagtagctgggactacagacgtgtgccaccatgcccggctattttttgtttgtttgtttgtttgtatttttagtagagacggggtttcaccgtgttagccaggatggtctcaatctcctgacctcgtgatccacctgcctcagcctcccaaagtgctgggattataggcgtgagccaccatgcctggccgagaattgctttttatatcatgaaagatggagtccattttccccagatgcatatacaattgttatataccacttatattaacaaatccatacttttccaaaagagtggtttgaactatgactttttgatttattttttaaaagttttattttatatatttaaggtgtacaacatgatgttttgatatacatgaagatggtgataaggttctgatagtgaaggcaaattaacatatccatcatcttacatggttacacattctttttttgtggggcaagagcacctaaaatctactcttaaagcaaaaatcccaagtacagcacagcacggtattattaagcatatcccttatggtgtacgttagatctctagacttgttcaccctgcatatttgctactttatattctttgacctacatctccccatttccccattgagtctttgtttgtttgtttgttatagattttacatataagtgagatcatgcagtatttgtctttctgtgtgtggcttatttcacttagcataacgtcctccagattcatccataatgtggcaattggcagaatctctttttgaaagctaaatgggccgggcatggtggctacgcttgtaatcccaacactttgtgaggccacggtaggtggatcacttgaggccaggagttcgagaccagcctggccaacatggtgaaagcccgtctctactaaaaatttaataattagtggggtgtggtcgtgggtgcctgtaatcctagctatgtgggaggctaagacaggagaatcacttgaacctgggaggcagaggttgcagtcagtcgagatcatgccactgcactccagcctgggcaacagactgagattccatctcaaaaaaaaaaaaggctaaatgatattccgttgtatatatccaccacaatttattttatgtattcatccattgatggacactttggttcctttcatatcttggctattgtgagtaatgctgcaatgaatatggcactgcgggtatctttacgagatagtgattacatttctttgggaaagtacccagaaaagggattgctgggtcatatggtaggtctatttttaatttctttaggaacctccatacttttttccacagtgtctgcaacattccatgttcccaccaacagtctgcaaggattcccttttctcacattctcgccaacacttactatttcttgtctttttgaccatagccatctgaacaggcgtgaggtgatacctcattgtgtctttgatttgcattttcctgatgattagtgatattgggcaccttgtcgtatacccattgttcattattatgtctttttgggaaaatgtctatccacgtcctttccctatgtttgggaaggtcagatgaccgggggctgcccagaatctaatgagtgctgccgagtacatgatggtcccttccaggccatggatgggaatgtttcacttgtaaattaaaagcaggaatacagtttccaggcaacccatagcctgcattttgctacatgacacttgccttgatgagcaaaaccaaacaccactttcatttttattgagcagcaacacctaccagcatttatccaggatttgcattgggtcattgaaatattcaactttgacaatctattatataataagtctttctggacatgaactagtgacaagttgtattaatgtgctatgatagggactattcatttttcttcttttgttactacagtcacctctttgaaatgtcagtgaaactgtagcaatcttttaaatatgtctgctggtgtctagtatattgattcacactgagggtttctgtattcattggaatcaggcaaattacaacacagtacttattatataaataacatctctaatggatatgagatagcataacattttcaataatagctacgtttgtttttgtattcagtttcaagatgatctgctttataataaagattaattttagcaagtaactaccagcttatctaagccaaatagtaaaactgaaaacccttctgtaaatttaagattatccagcatattatttaacttagtgagccttactggttaaaacattatatataggccaatgaaaatgtaatctttcataaaatctgaagtattctattatcttgataagatttttagtggactgtttctttaatcatttaagaattcatatcaccattgtttccacagcgtccgcatgtaaagtgctactctgtttcctgaatgaatgaatgcatgaataaatgatgcatattgaaatctttccctgagtaaagcatgcatttggcaatgtatgtgattaaaagaaatctgacttggttcctctcctagaagaactataatctagtttttaaggagtcaaataaaaggaaatgacctttatttgagaattaaaatgttggaaaaaacttgattggtcatttaggagttcattgtttctcaacctaattatattttggctcagtatactcttaactgtttttaggataattaaaaggaactcctaagagagctaggatgctgttggaggagtaagtatgcatgaaacaatcataatttaactaatttgcccacaaatgttagcaggaaaatataccaaaaattagattttgttttccattcgttatttttcttaatttctaacataatttttaaacaaaactgagagatgtttgtcaaaacacctcccaagtgatgatttccattagaatatgaactagacacttttcctccagtgggataagagccagattttcctaatcacaaaaattagggcatggtcaggcaaaggagtttacatgaaaagttttgcaaaattagtattactttgaaaatttcaggctatttggccactgcaaccagggagtcacttaattcttggcataaactccagcacttttggaaattgacctaactctataaggcaaaaaaaaaaaaaaaaaaaaaaaggccatatagtgccctaaagtggcaaaatttttgttaaaaacagcatccacaagtactgttaccagtttctcaggatagctgtgacaaattattacaacctagtggcttaaagcaagagaaatttattctgttatagcttgggagtccagaaatccaaaatcgaggtgttggctgggttggtcccttctggaggctgtgaggaaggatgcatctggtgcctcctccagctccgggggttgcctgcaagccctgtgttccttggcttggacagtagtcctctcttatccgcgattccactttccatggtttctggcagtttcatctgctgtctgaagatattagatggccatttctagaaataaatgaatcatacgtcttaaattgttcaccatgctaagtagcatgatgaagtcttgtaccatcctgccctgctccacccaggacatgaattccccttttgtccaccgtatccatgctacagatgctacctgcctgttagtcaccgagtagccctcttggttatgggatcgactgtcacggtatcacagtgcttatgtgtaggtagcccttcttttattcagtagtagccccaaggcacaagaggactgatcctggcaattccgggtatgttaaagagaagccgtaaagtgctttctttcagtgaaaaggtgaaagttctgtacttacaaggaaaaagatcatatgctgtggttgctaagatgtacagtaagaatgaatcttctgtctttgaagtttgaagaaataaaaagaaatctgtgcttgttttgccgttgcacctcaaactgcaaaactgatgaccacagtggatagtaagtgcttagttaagatggaaaaggtattgcatttgtggatggaacagaaagtgttccagttaatggcagttgggttcagtcctgtctgaggtttcagacatcccctgggggtcttgtagtgtgtcccccgtggataaggggagactgctgtagatgcatcccttccgtctctgcttttgtcatcccacgaccttcttctttatgtttctgtgtgtcctgctcagcctcttatgaggatgctctcactggatttagaacctaccctaatctatgatctcattttaatcattaattacatctgcaaagatcctacttctaaataaggtcatattctgaggttccaggtggacgtgaattgtggggagacactacttagccagctacaggtgggaaggagaccaggcaggtctcaagggtggcagcttcaccaacaaacaacggttgcccattggaagagccaggctccattcactgatatctcccaacagaccaggtcctgatggcaagattgttacactcatacttaagtataaatcatttatgtgcaaacaacattttgaaagtgccaatgcaattagttttgttgatgaaaaaataaaactttatagcatggatattaaccattatattgttaaatccagcataatagtcaaaataaaatcactgtaaggcaaagtgtttactctgcaaccatttcagtttcacaagatactgagtatgatgttgtggttttccttatctcatcattttacttggtaagtgtcgagacatgcaaaagcttagggcagcccacacagttcgtcagaagcacacgtggggagtttgttacttaggcagccagtcacccccattctatgtgtcaagcctggactaatggatgacagtggtgattacatcctatgaaaaatgattcatgtggctgtcttcaggaaagtcttcacgttgcacctacacagtcctaagactgaactcataaaacggcatcctatactaatattattgtcaaacactatgatttctttttgtcttctgtctttgatatctgcacctaaatattcaggtgttactcattcttatgaaatgggtcagattccaaataaaaattgaagttcctcttatcactgaccatgagggctctgcaagattgtcttgggaaagaagatttacattaggagctaggtcatggattcttgtcatgtctgtgtgtgcccttgtctacgtccaatgcacacaggatgaaaaactggtcagctcacgtgcccatagcccatcttcacctcacctcaagctaagacaccaagaaactcccagtgttcctgggagaaccaggccagtggaatcctgggcttgcatctaatttggctgcaaaaatggagatggtgcatatccctgcaatgtgagagtcagtcccacttgctctattttcacagttccttctctgtacagtaaggattttcttagtcttacaaaggcaggaaaaggaacagttaagcatgtaaatgcaaaccatgaaaacaagacctgttgccaggatatcttgtcccagggtacagtagtacttcccatgtaacacacatcctctaccatgccactctccaaaactgttattggggccggtctggagtccagcatgagtgagatatgtcatccttataagtgagataggctcagcctcgttgtgtgcaaacacgtctctgaggcctggagtattatgacttacctactggaaaaagagaaactgggttcaagggagagataagatcgaatgttaggatggactattttgatagctatctcaggtcatcatgaagattgcactaaaaccttggggagataaatttgtttaggacatgctaaatatatgttttccttttttctttctatttaaaaaaatctgagttgcagtcacattaacaggtcagtaacatagaggtttggttccctcatatgactttctgcatgtactttacatttttttcttgtttaaatgctaggcatattgtgtaccccacattggtttgtagccagctctatgtcatagggcccttaccctttacctatttattgttagtatcatgtccataaacaagccaatggctcagcatgaactgatgctaaagaaagctcatgcctgagtgataaattaagtgacctcagctatttctcttcagtgttgtgaaagttatttttaacagtaggtttcctggtagattctctaaccactcggtatttcacatggcccaacttggttaactcgactggttacggcaaatgctgataaaggcaagatcacaggtttgctccccatgaaaaccaataacttctcggagattaaaaaaaaaatctcccttctgtgaccacaagcagcatcactcatgcaaatgtcggaagagaggaattgggagtgagtgagagtctagcccagtgcaaatatttctactgttgaaaaaagaagtccaggcgcagtgactcacgcctgtcatcccaacattttgggaggccaaggtgggtggatcgcttgagcgagaccaacctagccaacatggtgaaaccttgtctctacaaaaaacagaaaaattagtggggcatggtggccttcgcctgcggtcccagctacttgggaggtggaggtaggaggattacctgagcctggggaggtcaaggttgcagtgagccatgagcgcaccagtgcaatccagcctgggcgacagagtgagactctgtctcaaaaaaaaaaaaaaaaaaaaaaaggaaagaaagaaaagaaaaaagaatctctcaagcatcaagttgtgttcctataggacacatgggtttctgcatgaaagcaactatgtccagtcccctaaacctggtgattttattggaaatacctccagttaatttttacgctaataacctcagcccactcacaccaaggccaaaagttaccagagttatgaacagagccattgcccaccttttccccctaaacgttgttgttggtgcacatctgcagaaagaggccgtttacgtggaatttcaaatctggttgtttagtctacaaggaggggggaaggattctgtctctttaatgtttataacggttggacagagcttgtcgggtgaaggttaattgctctccagtttaagcagttctgtgcccagatgggttatcagggctgaacactcgttacaagactaatctcatttccgacaagacttccctttccttcaactgatttttgcatggccattggagccgtcatcagccgttaagaggagggtggattactctgggatattaatgctggtatgtggtgaaacaatgcggagtggtgttgtatctcagggaacatctttaggagaacatgtttcgctggtgttacgaagagccaggctcctaaacctaaacgtggagacaatgggacccctgaagcgaggcacttggtgaaaggtgtaggggcgattgcagcccgcctctctctgaggaggaccctgccctgataatacacagcgacacttagggctttgtttgcttttgaagatttttttttttaacgtactacgttcagattttcattcctaaggactacacctaagcagcgaggagttctgtttgctgctgccacacggagccctgtggcagggagcacctgtgatgcagcaacttcatttaattcctgtgaaacgtcaggcttctctttaatttcagagatttcatagatgtcatcatgacatatttgcctgaaaatagtaggcagatttttaaaaatttaataacaagtagcttcctttctttagtttgtctcaaaaaattcttccaagaaatggcagaaaggcaatgtctttttatccctttgggatttggtgtgtggaaattgactcattcatttactcactaaggatttactgggcacccactaggctcatgggtgctgaggggcatgagcagcaggacagctgggctcactcagtgctgtcaatcagggggatgcagatgggggagactgacaaatagatcacagctcaacgaagacagagtgtggcaggaagtcaggagccttaggagggaaggtagggaacatgatagagccaggtggccggggggcgggacctctagtttagagaacatgatcaggcaaggcctgtcagacagagacccaaagaaaaggtgagaacaaggtttgcaaatgcctcggaggagtgatgcggaccaggggaatggcaaaggcaaggaccccaaggcggggacaggcagagggtgtctgagagcagcacatcctcttataatctagtttcacagaggaggctgtcagaagaacagccctaccctaaggaagggtccatctgctttgattgtaatcgggcacagtcctggacaccgagtccctttctgtcaggtgcgaaaagcttggggaatgcatcttggtcatgggttgctactaaaatgagcgtgtcatcttcaggggacaggaattaaaggcacagagaaaaactgaaattatttagcttcccttcccttctcccttcttcccatctcccatcccttgccactgattatggtggggctggctttatatattctctagtttctcatatgttgacttatttttgcagtcgtttcagttctaggccatttggtgcattatgttccgcgtttatgggcatgcgctttggaaccaggcagctggcttagaattctggtgcattaactggcaagatgctctaggcaacttatttaatttttggagtctcagttttcctcatctttaaaatgggcataatggtagctagtgtgcaggttagatgcattaattcacatgtgcatgtcttttagagccgccacgctgtgatcacgttattaaatgttagatgttatcaggaaggtcctatattgtctacgatgcttcactttctttgattcatctgtttcactgagaaaagtgagataaattatcattaatctagagacatttttgtaggctaaaggcttcttatcacaacgttttctccaaaaaataacgaacagacaaaaaaaaaaaaatggagccaagtctttcaccgtatttgtttgtttatacaagggctatatagtcaccaccttccatacaggtaggagtctcatgactttttggtgaccctttcagagcaagggttatttctgccccacaggcatcatttgacttagtgagattttcaacacaccctcaaagcacatgttttttagggcaaagagttgaggagaagagaggcagggtgaaagtctgagcctttggtgcagcacctctgctggcttctgagactctgtgtcacccaggggtgggaggacagttctctccagggcactcatcaggaccctgctgcctgtggtcatgagacaaggagatcatgtgtcacaaaggcactcaacatgcagaggcggtgtcgcctgtcacctggaggggctgcacgcaatgaacttccagtctccatgtgacctcccacttcttggctttcctactgaggaatttgccatttcctgtcgagaagtccagggtatacaggagcagtaaatgccgtggagagggtgggggcgggagaaccacaggaagtcctcagatatgaccatttgggttggtggagtcgggaccaacaatgggttttacctctcacagttaaactccattgatgatgcacagttgacaagaattgcccctccaagatctcattgctgtttctgggaagtaaacgctccttaaaagatttacttgtgagtaaacttctaaccactcttctttagctgtctaaggaaaaaaaagtcagttggctcatgttttccaacttacttcctattatatacacacatacatatacacacacatacacacatatacaacacttacacacacatacgctcacacatacacatgcatacatacgcaaacatgtacacatacacatgcatacgtacgcaaacatgtacacatacacacacacacacatatatatatttatgcctgtttagatccaaaatcacacactttatatagataaaacttaagtgaactttaatatctgtaccatacatttaacttcatttcacaaaatagtaatatgtccaaaccacgtctttcaaaaaaaattttccctctctcaattattttctctgagattacaaaggatatcttctcctaggatttgtaaatgcatcttaatttttgatgctcccagatttgagtcaatttcccctacgtgaagtgaggattaagtttgaatcattattatttcaccactctctggtatctaaaataattatttttttcttatttaaaattgtctttaaaaaacagctttgtatatatatatatatgtatatatataattgaatgcaaggtcatattaagatttaaaaccatgggctcagtttctgaaagagcaatgaaaagctggacaagataaaggaaagaattcactaaagacagaggatcccacggaagcttcgcctgcctaggcagagtgtgggtaatatccagatgaggctgaagtgatgtgagtcaaatttgggaatttatttgacctggctgagctcctgtgcccttttgacgtgtctctaagccttttttttttttttttttttgagcgcatcctccatttcattttgaagtatgtatttgtagacggttttatgctgtgaaaatgaaaacttgctacacctcagaactacgtctcagaaggcagcggactggtcttgcaggtcccggaagttctgccccgcagtgcctgctgcctgcctcatgccgggtctgcaggcggggagccgaggtcagccgaggagccaagctcaagggccgagatgggctgcaaaactcatttcctccaggccctgctggggctccttgaaatggaaaaataaaaaagtcaggcccagcatgcaccaagacagggcagacaaacgacaagactgcaggtctgagctccaagcgcacgaattgcccacgtgcagccattttctgctttgagcgtcatggaaaagagaaacttagtagctgagacacgtttcttccccttctcctgtgatttgggaatgcccttttccaaacgttcattttcttttttctccctcctgactctcagggcttcatgttccttatcgtagagtgtagctgccctgtggaggcctgcgcaatgtgatgagctcagcgggggtaaccaatattgccacctcacgtgggagcctcaccactcttaggacgtgttttcaggggagagttagagttttagaagttacaaataccacactcgcaagcaaactttggggacacaacctctgtctttatctctaaactggtgatcctaaaatatgtcccgtatactatgtggagtggcatggaggagcaaatgagacggtaattgaagggtgtttattaaattataaagtgcccagcgtataatcccgtcattgactttacataatggctagtgtaacacccattgcatagagtgctggcatgcagtattttctatgagtgacttaaggtggcatacaataatagtgcaccgtttcatgccttccttccttccttcctttctttcattctttctttctttctttctacaatgattttacatctggtatgtgccaggagttgttctaggttctgggaaaacagtctctgccctcctgggttttacattctggtgtatcttttgtttcaggtaatactcaaatcaacaaatgcccgcattcaggctcatcatacacgctatacgatcaaatgaagcagcatatggaatagagatcaacaggggagggggaagcttttggagggaggatccagtgatctcataaagatcttgtctgagcctgttagttctgaggtgtgttttggacattgaaaaacctgaaagtaattaaccttcccaatctaaaccgtattttccacaaataggtttgttggatactagtattttcacgtgtaattagaaaaggaattactttccattattaacaaatagatgtgactttgactcatgttcattttttttggccacaaattctcagacttttgatcttaatggtcaagtgcaggtaagaggaaatgaaacaaaattaagcaatgatttgaatacattttctcccttgtagaagactaattatagtttggtcattgagtaattttctcagctgcttaggatctttaattaggtttgatattcactatgaatgtgtggcagggtttcttgggaaagtagagacgggataaaacataaatgatttatgtaactggatatgtcccagagtgaatgagactttggtctcaagaactgttccagtggtttgtcgttctttgatgagctccgtaagtgttgctcttctcaacagaaggttgaattttaggtgaacagcctttcctgattgtgtagatctggaccacagtttgaaggtgcccctccctctccctctgattgccagagaacccctgcattatcacagcaacccaagtcaccccacgtattcccaaacacccatctgctcaggacagaagaggcattgcctctagttgagaaccaagaagtggtcatttccttaaaagctttgtcttgtcttattttaatatttaaatcaaatgacagaactgtttatctatttttatcactaaactccatagtccaattttcgtcttcatacaaattaacatgtttttacaaaatctctaatcttatgcactgctcactggcaacctctgtggtgaactaaaccgtaatgaataataggccagagagccaatgcagcctaggttgcctagaggacagagaaacccagtggcaatttctgcagctttgccaacagccctgagtcacctcgaccctcccctggctcctggtccagtctgatgaaacagtttacaagatgtcttccaggttagcttttcttgttagtatctgctttcaactcaaaatgcacacactcaattaaatcttctacttctgtatgacaatgttaatagactcttggaaaaaataaatgaaacagaatttaatggtgccaaagttgattatacttttagttttccatggtcggaaagctgggtcaattttatttggttcctggtccaggacttcgcctgtgaagcagtttgacaaatgtaattataaaatgtaaatatggaagaaaagagataccagtgcagagtgaactagactttactcatttctgtggcccctctgctatccactgtgtagatggtcaatatgtatttggtaaggtaaatgcaattatgacagaaaaagcagcacatggaatctttacaagtaaataatttttactagcttaacagaagtattttgaaaagagaaaaatcttacgacttagcttggcagattagacaaagctaggatcagcatataagatccctgatattcctttctttctgccgtttattcatcaccttcccccaaatgagttaggtcatctttttgaactttaattcaattaactccagataattataacaataataataataataataataatagaaaacactcatagagtgcttattatatgctagacattgtattaagtgttttgcttaatacaattgggacagagaagacaggttcctgcaatcattatagccatttcacagatgaggaaactgaaggacacagaggttaagtaactagatgtgtatccattcagcagctgtgcagtgggttccggagatacagaaatgaatcagatacatccctgccctccaggagcttacagtttaatggcctgaggtagatgcataaaccataggagtacatagctgcatatacaaactgcagacatctgtttgcaatatagattatacaattaagaagacaaattgctggggaaatcgttgtaataaatatggcaagtgttaatacccataatttatgcagatcatgttacaactgaatgagatcacatgtgtaaacatattctgtgagctgtaaacaggagggaatgtaaaaggttataatgactactccaacacagctttattaacatagacaataaacctgtgaatttgttacttttccaagtaacagcaagacttgtttaagagctgcctagaagttctgggttttttgtttttttacttctccatgtatttgatagtaaaaaatgaaagataatttattatatcataaaatgtgtttgttacaaattaatattgcctgaaaggaaagaaggagaatagcccaaagcagttaatacaatgattccgcaggaatcaaggtgcagctaattatatttatatgtactcatcgatttttctaagaaagtaggatattccaaagcactagagcccagcccatgtgatggtgttcgtgagcatttgtggcagagtttctgtgaagtttgcatccaaacagatgggaatttttcaggtaatggcatacaagtaacaggtaggtagactactcatgtcttgtaagaggcgtttaaattttatcacggggagagatagactagtcagtcactcagtgtttgctaagtgcgttaatgagtcacagatggatagacatggcattaaaaacaagcatgcccagagttctgaggatgaggctggactttagcataagttgcttggattctctgactgaaaccattcttcttagaagcccttctataatgtaaatagataaggggacccccagtggcatgtcaaggccatcaggggtctcgggggctatggtttttttttggacaaagggctagagttctggtcttgaagccacattttcttttttttttttctttttttttttttttttttgagacagagtctggctgtctcccaggctggagtgcagtggcgcgatcttggttcactgcaagctccgcctcccgggttcacgctattctcctacctcagcctccctagtagctgggactacaggcgcccaccaccacgcccggctaattttttgtatttttagtggagacagggtttcaccgtgttagccaagatagtctcgatctcctgacctcgtgatccgcctgcctcggcctcccaaagtgctgggattacaggcgtgagccaccgcacccggcagaagccacattttcatagtgagcatggtcttttcaccgacatggcaggtttgttggggtggcttgatgaggtatatggtgaaggctcccctggcattccagttgccagaggggactttagaatgttcaattctttcctctgctgtcacatgggttttagcatcatcaactgtggtgaatggagcatccagatcttccaattcatcccatgattcttgtcaaggaaaaaaatctttaggatttgaggccagcactatgggaaatttgaaaagctttgctcctttcaagtttaatttttgctttcagaaaacaaataagtttacagtatgcattccatgtgaactccaatttccctctctatattcagagaaatacatatctattttctattgcacagagctacggaatagtttaccaggcctggtagcagcccaacaggagagagaaaggagtgagacaggctgtggcagctgggagataagtgcaattgatgagctgacctgccgggtggggaggaaggtgccgacctataggaaccacagtctcattccacctaagggctttctctggctctccaccacagccctttcacttgaagcactaacacgtcaccttgtggactaagaggagttttcaccttttctccttttctgcacccagcttcaatcattggttgatgaccagtgaaatgttttaagaaggcaggaagctggagggagaaagacaaaggcttacatatctcccagaatgggtaacaggctacagcatgcatggccatgagttggatgtgcacatgacctgtgtacataaatgacaccctcatgcacacatgccgtaagtgtgcatatacattttgttaggtcaatttctacatcatattccagaaagtcacataatcagttttcttttttggtattcacaattcacttggaattcaccaatttattatgtgacttgaatatgtatggcctttctgctgagtggatcctgaaatacaaatacttactgttactggaagccccaaagtcaagatgcaaattaatagatttctatatggcctcagatctgagtcctctgaaactggcgatttaacaagagcacatgtacagttacagaacctccgcgggtgtgtctttcagggttcctgtttcttatttccatgtctctgtacccaacacacttcctcctgacccttctttctctcctcctcctccacacccgcagaagcacctagccccaccacacataacttgctagtataatgcatttgttcttggaaaatgtgtgtttttgcacactttggtttccacctgcttttttgggaagatgtactatatgatgcataaaagatccggagctagctaggaggagggaggtttgtttgaggcaacagtgcaagaatatcaggtcattctttcaattgcacacttcagagtatggatacttcccttgaaacatttgcagcacaagacttttgcattgacaagcctcttgcttttgaatttgagctgtcaaatgttgtttctgctttcatttgttggatgtttctgcttgaactacaaggtaggacctcatatagataaaaaaccaagtctttaacccatgacttgagggccgagattggattctgattctcagcacatccaaacatgtcttgaatttgtagccactccttgccaaattaactacctctgtgactttaagagtagctaataagagtaacaagctctagtccctctttgcaggatgtaagggtttctaggggccagaacatgttgggcttcttacgccaggtgaaagatgttggatttcattttggggaaaagtgtaacatggtaggattatcattccagtagagaaaccctgtttttcagtttgtatatgacctcacatgacttcacagtttggggctcccaccctgttgtaagttgtccacatttggaagaaactgtagttccaaccaactgaatcaattatctgtaaagttggttcatgcaaatcagtgcatacatgagactgtgcctgtttggtttgtcataactattttatcatatgaagaactgaccatccataagaataatttcccagacctgtcattctttaaattccttttatttttgcttccaacatagaccccccctcactttgggagtatatcttccaggatcatgagcccacgagaggccatcttagtacactgtgtaggaattaaaccactcctgcaaatgtgaaacaaactgtacttttcaattaattaaaatcatattccagtgtgcctacctaaataagagtgatattgttttgagcaagatgagatgatttatatatatataaatcatatatacatcatatatatcatacatatctatatcacacacacacacacacacacacacacacacaccccagaccatcagacagcctaaactgttttaatgtatggaccattattgtagtgatggattttcttcttggttctagtttcattcatacaagaatgctgatacatggacaacaacaagacaagaatataactatttgcagcctattatgtattatttcaatataacattaaagtctctagtactggggacaaatttaaacgtagctttaaaattatataaataataatgagcatttatcactagtccccagaaatacaaagtctagcactcatctctccaacaccgtgctaactgcagacagtttcacacccagcatcagaatcccacaggagtccttagctcctccccattccagcccaggcacctcctctgaaaggcacaaggcggtcagggagggccatctcatctccttatttcaatctctagttttgatggggatgggatcaaggaggatgagatattcacagtgacatattcagtatcggagaaccaaagtaaagtggttagggccgtcattgcacgtgtggcaaaacttataaattaattggaatacttcattttttaaaaaatagactttatttctcagagcaattttagtacgcagcaaacccgagaggaagatagagtgatttccatacacctgctgcccctacacttgcgtagccttgcccacattatcaacattccccatcggagtgcatttgctacagttgatgaacctatattgacaggtcattatcacccagtgcctgtagtttacattagcgttcatttgtggtgctggacattctgtgggtttggacaaatgtatatttacatgtatccaacattataggattatacggaatagtttcactgccctaaaaaccctcagtgctccacctgttcacccctccctccctctaatctttggcaaacactgatctttcagtatctctgtagtcttgccttttccagaatgtcatataattggaatcatataatatgtagtcttttcagatcggcttttctcttgggatgcttaatttttcaaaaagtctctgtgcccatctcttttcatggggaacttgattggcacatttaaagtacaattcaactaacaaaaacctacttacatagaacacttcagaaacacaattacagacagcagggtacacttgtaacatcccacaggcaaaaacaggacaaattatttggagtctagcctcttacagaggaagaatccatgttgcactggggcttgcattccttggaggtggagaagatcattcctaggactagggagcaaattgagattttaaaacatgaacccagaaccaactcaaatgctcatcaacaatagactggataaagaaaatgtggcacatatacaccatggaataccatgcagccataaaaaaggatgagttcatgtcctttgcagggacatggatgatgctggaaaccatcattctcagcaaactaacacaggaacagaaaaccaaacaccacatgttctcactaataagtgggagatgatcaagagaatacatggacacaaggaggggaacatcacacaccagggcctctcggggggtaggagggtaggtgagggatagcattaggagaaatacctaatgtagatgatgggttgatgggtgcagcaaactaccatggcacgtatataactatgtaacaaacctgcatgttctgcacatgtaccccagaacttaaagtatatgaaaaatagcattatctaaaaatgaacatatcctgtagaataaaggcaacttcaaagaattcgtcgatatgataggttagcagttggaatttagacaataaaataaatgcagttaattatgaattgtattaatgaaatgaaattgctttccacagtgtgtctgatgttttaggacttcttgtccacaaatagtttgaagcactgctgttactctctgggtactaggcagaaaagcctttgggactacggatggatgtgtgaggcttttatttctgggctttggaagtaagaaatatgacctattccccaggaaaaacacggaaaccagaaggcatggtaattcagggttcaaccacaagaaaacaaaaagttcagttacacataattacacttttctaagatagaatccaatagtaacatattaacaaatagttgtttaatatttaatttggtttgccaagggaattcttaataagttctgaattatttcataaaaaaaaaacatgaacccatccccagtgctcatcctagtgttcggagtttttaccatttctgaatcacaccttggaatcaatggagaaaatcctgctttgatgcacccttgctgcttagacgacaggacttcttaacccatgaccccagtagcatcatagataaaaagggtgtgtgaaaaaggagtgaggggatacgggaagtgggaatacaaagcctggattacgtgcagactgaaagtcaaactctggacggggcatcccaggcctgtggaaaccagaaccaggctatggatccaatgggaatttcctcagtttcagcttccccccaaccagcacacataccctgggccctccccagctcacgaggggtggccccacttctatgcttttccttgcagtttctccatctggaaatgctccccaccattttgatttacccagtacaccccattcttcaaggctcaggccagtgcacaccagttcctttaatccctccttccttcttctgtcatccagtcgacacacttagcatgacatttggcacctgcataccaggagctcatgcaacaaatacgcactgcatgtgcatgatatgtggacacttacaggctctgaaaaagagaaaaaatagaaaaaagtctctgccctcatggagccagtattcccccagccctgacgaatctcctgctcctttctcccagtgtatttcttcccctctgttaaagtagttcctagagtcaaccacatgcagaatgagccttcaccaccatcaggctcctgctctgcacatgatggatgcccagccacttgatcttagtattaaatgcctttgagactctgttttataataaaatgagacacccaagcacagaccccagcaagcaggtaaacagggaggacctttcagtgtccaagtatgggatacacatttaaaaattaaaataatctggttatatttaaaacaagtggcccttaacattaattggggagtgccacttgccaatccagagatgcaccaggtgtaccaagatggacacactgggagataggcagggagtctgtgcccgggctctgcagtccctcagccccagggaccagtgtctcaagctgcctctgatccagaaaagcacagttagcttggcaacaggttggtggtatgcagttgctgctcatttcctggtccgctttacaggcctgccccttgattttgccataagacaggccacttgcaagaaggttcatctagaagcagatgtgtgctgtgtagctgatgggtgggggtcatgatgggcagcctgcttctttagtagactgtgtgcagtgttagagagccctggggcagcactcgtcagttaggatgcacaaaaatgccaacccccgactctcagttttttaagttgcataaattccaaatttaacatatcaccatgtgcagtcttggaaggctcaatattggctttaaaaaattattttcctaaggactctctgttgtcaacttgaggaaatggctaacaagcttccttttctatgacacttagctactgaaaatatgttcttcataaagtgtcttattactgtcatactgtgggttacttcagtaagtacagactgtgtcctagccaagcttaaaacctcgacggcagtgattcttaatcttttggtctcaggacccctttacgttcttaagattggttgaggattcttaaaaaaaaattgtgtatatgcattatatctattggtagaaacaaaaacagaaattttgaaacatttacttataaattcatttaaaaataacaataacaaggccaggtgcagtggctcatgactgtaatcccagcactttgggaggccaaagcaggcagatcacctgaggtcaggagttcaagaccagcctagccaatatcatgaaaccctgtttctactaaaaatacaaaaaaattagccaggcgtggtggcgggtacctgtagtcccagctactcaggaggctgaggcaggagaaggcatgaacccaggaggcagagtttgcagtgagccaagatcgcgccactgcattccagcctgggcaacagggcgagactccgtctcaaaaaagaaaaagaaaaagaaaaaaaaattagccaggcatggtgggacacgcctgtaatcccagctattcaggaggctgaggcaggagaatcacttgaacccaggaggcggaggttgcagtgagccgagatcacaccattgcattccagcctgggtgacaagagtgaaacttcatctcaaaaaataaaaataaataaataaactcattgcatgttaacacaaatgagatatttttatgaaaagtaactctattttccaagaaaatgttaatgagaagtggcattgttttgcattttttgcaatctctttaatgtctgggctaattggaggcagctggattctcagatctgcttatgcctgcccttagaggggtctggggaccccagggggttcctggacaacactttgagaatgactgacctacagagctccggagaatcactgacctacagagcatagtgtggtacctggcactgtgctaggcagggagatacagcagtgaagaagagggacacattctctgccttcctggaggatggtatgggttgaatagtgttccctgagttatgttgaagtcctaacccccaggacctcagagtgggaccttatttggaggtagggcctttacagaggtaatccaattaaaatgaggcccttagggtggtccttaattcagtgggactgatgtccttataaaaagaggtaatttggactcagaaacaggcatgcatagagggaggatgatatgaagagacagggagaagatgaccatccacaagctaaggagggagtcctcaggaggaatcaaccccgctgctactttgctctctgacttccagcttccagagccatgagagaataaatgtctgttgcttaagcccctcagtccgtggtacattgtcttggcaaccctagcaaatgaatacacagactatgtatcgaatattgaaattgggttttaaggcagtaataaggcccatgctgcttccttgaggaaaattcagccgcaaaagaggattcactgcttattaatatggagacacgttctaccagatagagctctgggaatccaggttctccataggcaagcacagcagtgaacagtttttccaaacgtctccttcctaagcagaaaggaagtgacaccattgtctgccatttgccattcagagctcgttaaaacctacagcctcacacccatcaccggtccacaggtaaacagagatttcagggcaggggaatactttggtgccgttattcctttcagttgccacaagtcagtttccctaaaggctgccctattagtggatgggtgggtgggagcctcagtgaggtatttcctgtgtgagtcaaagcctttcaaaatggccgtgaccccttgcagactctgaatgaaaagtacagattctcagttcccagagtttctgcatgtgatgatgaatggaagttcccgttgcatgtgggacaaaggatggctgtaacattttattaggtgtggcttttggtgtacacatggcatatgcaatatatgcattctcatcacatttagttttgaaaataataaaactttaaagatagaaagaattttctttgcagaacccttatgagatggaaaatattagtgcaacacagaagaagacaattcccgggcttttagccaagacggctagagagactccacttctctctgagtcaacacccaggttcctgccatggcctgcaaggctctaccacccccagcctttcctggttcacctcctggttctttctttcgctcctttccagtaacccctcctccctggctgttcttggtcccattgttcctcgtgcagcccccgcagtccactctggccttgttctagctgttgccaaggctggaaggcctattcttcatgaatgcatgggggctcacaccctcccctccttcgcgttttctcaggaccaccctggccactctaaatgaaaagcagcagtttacctctcttttcctgagtctctagttctgccttctgtttcttcatacttatcacttaccaccttctaaccctgagatcaggcttgaaaaacaaggttataaatttaccctatcaattattggttgattaattgattttcaaaaattatctgtggcttgtagtgctagaatacaagccttatgcagataggtgtctttgtggttttgggtcatggatgtaatctagaagcagctagacaagtttctaagtagaaaaggtgttcagtacatatttgttgaacttatgactaagagaatattcttattcctggaagatatgtgtgatttctagtggagactagaaatggcctttctctgaggcaaacttctaaatcctctgaataaaggtatctctagcccatctgactcagtcccacacccctgggctgtggaataaccagtttagggggtgattaaaatggctacataggtacagaaatgttaacttcaggttgtcagtgtagcagaagcaaagatgtttgtcgtgttgtctgtgaagacgtgctataaaatcgtcccccaaagtaaattgtaatggcaaccatgccctcagattgttctggaggatatagacagggaatcagacactactttcaaaactgttacataataaatcttacattggaaaactgtcttagacctgtttagaaatcttgcattctctgtcttagaactttccctcttgagctgataattatcatccagtaatgacacttatgtggccttgggaaacaagttattaagcatgcacctgccatccctccaaggcagtttcacccttcaaattaaatgcgctgcgcttcctggcagcgctgaggccattggagtggctcctgagtgatggcttggaagaaatgatagcctagtagagaagtggcccaggagagtgcacagaggaaagctgacatttagagaatgaggagagaaaaaggagggcataaagagatgggggatggaattgtcaaccaaataggaggaatagcaggaatatggaagccaaagaaaagagggttaaaaaaggggagagtggccaacagtatgaactgctcttgagtaggtaacaaagagaccagctgggagtgaatgtttgagggaaccccaaaaagctcactcctaatcgtggcaggacagtgtcagaaccagacggcaaggttggagaagagaagagagcaggagatgagaatctgttaaagagctgtgaaatatttaagtaagtaagtatggccaatttttggttccttgcatcaccagctaccacccccaccttcggacacccagaccaacacacgactcttgcttgaaagcaaagtatgaaggttagagacactgacgtgagtgaaactagactgaacgtttgcgagatcctggataaataaatattggatatttttgttggataaatattgcttggataaatattgcgaaagtgcattgtgattgcagaaatactgaattggcatcagattcattaataaaaattctgcctgacatctcacgtgtcaaggcccatgggagcctgactggccactacttggtgcattcttttttttttttttttttttgagccagagtctcactctgtcacccaggctggagtgcagtggcgcaacctcagctcactgcaacctccacctcccaggttcaagctattctccagcctcggcctaccgagtagctgggattacaggcacacgccaccacacctggctaatatttgtatttttagtagagacagagtttcaccatgttggccaggctggtctcgaactcctgacctcgtgatctgcccgtcttggcctccaaaagtgctgggattacaggcacgagccaccatgcctggccagtgtgctcttttacagggcccagggagctcagtgctccagtcggctggttttccagttcaggagcttaaggcttcagattcagcagtggcagaagtggtttcccaacttccagctgccctgttctttgcacttttttttatttttaagtcaatctaaaatgagtctgtgttcacaaataaatagcgacaagtgcaagtctgctagagtggaagagagcaagtgcaaattctctttccctttagctaagttgctctttgaagtaggcgtagccccatgacgctcccataaggcttactgtgcaggttggatgagtaggcaacttggaaggccccacctgctctgcaaggaggtagtcctgcacagcgcctggtggtcagatgtccactactcacctacccgcccaccccacaggtggctctgtgctgctcagaacctgcacagtggtgcatagcatttcccagctcttgaagcttccttttcttcctgggaaagatagatgtgaacatccatgacctcacttcctccacaaggatgaatcttaataagtaaagaggtccagtaaggaggcaatctaaagaccgaggtttagactctgtgtacacgtcaagatttcaagtcaccaggctgttgggcaggccttgatggtttggatatgaatgactctgcacactttcaaagagtatttgtgacttttttttttttttttgagacagagtcttgctctttcgcccaggccagagtgcagtggcatgatctcggctcactgcaacctctgtcccccaggttcaagcgattctcctgcctcagcctcctgagtagctgggactacaggcatgtgccaccacgcccagctaattttttgtatttttagtagagatggggtttcaccatgttagccaggatgttttccatctcctgacctcgtggtctgcctgcctccacctcccaaagtgctgggattacaggtgtgagccaccccgcccaggcttgtgactttcaaagtagacatatttatagaggggctcaagccagatggcaaaagagccctattggatgtgatgtaagtatgtgtagtttgaaattgttggagggattgctctcctagttcaaatgtattaggttttgaggtcagcactcccagagtcataaaaatcaagtctcactggcaaccaacttgttagtgcatgaaaagtgttaccaggacggggtctacccagtgctcatctatgtcataggaaaagcatgagctcagcgtataacattagcaaagggctctgatgacctggctacttagtcccctttccatgcagcaaccaggatatatttatgtgctggaaaaatcttctgaaaagcacaggcttagcatcccagccccagggagtcagacatcatcacttaccaagctgaagaaagaccttggcagggattggaccctcacagtgggtgaagactaactctttctacgtaagtcagcgtctaagaaaaagaaaacgtctgtgttcatgtctgcgttatacagtgtgtggcccatgccaacaatgatggggatggggatagaaagcaaaagaaggagacccctggaccatcatgtgaatagtggagacttattcatgtgctcctctgtctgccagaaccccagtttctacaagactttctgttggtattaccatgttgccatgtgttttttattttttaaatttttttatttattattattattgaagtgctttatgtgtagaacagatgccatattcccatgcaagagagtagatcctttccacacttaaaaacataacactagctctcagggtgctgactagcttcttaccattagcacagaaggagatacctacaagattgaggaaaattaaagtctgggggcagcagggaaagaccctgcagttagcatctaacctggatgcataggaactttttagcaactccatacatggtagatttctaccttatctgcatgtctgctcagagatggaggaggtagagactgcagcctggctatggctgaaagaggatgttactagttaaacaaatcgatctcattttggtgcaaaatggagtcttagaaaacatcagtagaccagaccctcattttagacgaggagcttgaagacttggtacatgaggggcacggagtggtggagccccatggccagtggccctgtggtcttgcggcttcttcttaaagtgcccatcctgcatcctggcacgtgcatgttgaacctggtgtgacacacctgtctgtggggaggggggggaccgtaccaattatttaaaaaattaaggctgttttgacacccccaccccctcacccccgtcttatgggaaattttgaattgagtgtttgaaggcatgagagtgacacctgatgaaaattagctaaaagcagagacagagttgtgggtggaggccaggacatctgctgcccctatcttttgcttgccagggttttccattgtgccagaattttctcatgaataaaattcctggaattttatcgaaaacaatgaatccatgtgtcagagattcacagatgagacacattccagatgcgtagcacactgtatttttagcctttgtgtgttttgaaagggccaagcataaaactgccgatttttcacggagctccttctgaagaggagagaggtggtgcaccaccccttccctggtgttcagagaaggaccatgccaatagaaaaaaagtgcaagcaactttgctactccttgagcttggcctttgtgtttctcaagccttgaatcacctgagtttcaacctgggcttgtaagtttcaaaaatcaccaggacagaatgatggtgtgaacctcttagccagactgccatggaaacacttcctcatagaagtttatgaaaaattcaacaatttttagggaaagttaacatagaaagcattatggattccacatcctggaagaaaagacttttcttcagaagtttgagggctatcaactttgtgccttgtgctattctaggtaaaaaaaaaaaaaaagaaagaaagaaagaaagaaagaaaaagaacattatgttataagaccatggtatatctattaatttattatcttgttatgtagagaataccaacagcacgctggggagtgtaccaggattcattccttcctgcacaaagctttgatttaattgacattaaacaaactaatgtagaatttgaatggaaaacccacaaaagaactggaccagggaccaaaaaggctataaatcaaagtgacagacgtgctcttgaagtaaaagatgctagatctcccttcccctctgttaggtagatacttggtttgaaaatccagtacttacaaaaaataagtgataatttgcacacaagagactgtgattttccttgcatctggcttgttagaataatatgactagaatggataattctgatggttcacatgcagaggtttggagtcagtcacatcacccttctatcatatgataatttaaatacaatattaagatttatgaaacctgttacacacactagattatttggcccatttaactgtcctgggagagagctgctcggcagctggttgccatcagtaccacctttatagttgaagaaattgagagtcaaaaaaggataatgcagcacttgttgaagtgagcaggcacccagctcacctggggaagttgttacaaagcagattctgactcagcagggctggagactcggaatctgcatttctggcaagctctcagctcacacttggggcaggaaagggttaaaggatttacccaggtgattcccagagcaagggcagagcccagcttgaaactcacatcttccatcttcagatccctatccctggctcccgtgctctaccagacggtctcctatccattggtacagcttcatgttcatcctccactgagtgattaaaaaaagcaaagaaaaacttctttttatctcaaatgaattatttaaaactagataaaaaataaggaaaagggttttgatgaatattcgtgagtaacgtataacagtgattagagaaacaaaaacaagtattgagtgtcaagagtagaaacagccctcttagaaggatgtaaaggaatagtgagtgtattttttgcacccattccaatgtaaaacatacaaacaggaggtttccacagatgtttttatactttttgctcatctccaaagaaggaaagaagcctactgggaagaaaaagtgattcttcttcttcttttttttttttttttgatggagtttttctcttgttgcccaggctagagtgccgtggcgcgatctcagctcactgcagcctccccctcccgggttcaagcgattctcttgtctcagcctcctgagtagctgagattgcaggtgcacaccaccacacccagctaactttttgtatttttagtagagacagggtttcatcatgttggccagcctgctctccaactcctgacctcaggtgatccacctgcctcggcctgccaaaatgctgggattactggagtgagccactgcacccagccaaaaaagcgattctttaaagaagaaaataagaagctattcacatcacaggcatgttgtttcttaaacagttaaatggcatttgccagggcaaagagtcccagttcattgtcctttcaaatgcattcgaggtttattctgcatggcactgagaaaacagagttgttttaaaatgatgttggttgacattcttgatctcccaaggctcatttaaatctaattttcattatgtggacataactattctttctttaacatttttctaccatgctccaatctttcacaatatttctagagtttctgctttccagattgaatgctccctccttcttttgcaaacgttcattttccagtaagtcttattttgttcataggttgcttagctataggaagtccctatttaagcctatgtggattgaaggtgaaactctgcaataatacgctctttggtagtatgactgcagacatattgccaatggcaattattttccaaactccctggaactcctgggcgttggctacacaatccattcatctcacaaaaacacgtctcttcatttggatgtaatagaagtttgtggatcccatttatagcattatgatggggctgtaatatcacctgatgtcttagtcctagggctaatatgaacaccaacaagcatttgaggttaagaaattatcttatttctagaggcagacatacagaggagccagccctgaaaatgcttatatttgaataaaggcaaggccaggggagaagtatgtgggcaaagagaattgctggcaccagccaggccttctcagagccctgagaaagtctgtgagtccagagccgggaaaattggctgaaggacatggaggggatggatccccagctaagtctgttctgaagggatgtgctgagcatagggaaaagcaccttctaggatgagagaggaaggagcagaggtgaaatgggaagaagccaggttctctgtatcttttaggcaacatttgccctagtggatatgattaaagataaagaatatctgaaagtcctctaaagcgttctattaataaagataataaggataaagattttcatctctccttattatcttagtatgtatttagtaatatgtatacatatgtatgatatttttgtatatacattatgtattgtatatctgcatgtatttctgtaggtatctatttgcatatatgcatacacttatatatgtatttgtgtatatgcatgtgcgtatctgtatatatgtgtgtgtatgtatatatgtatttgcgcatgtatgtatttgcatgcatgcacacatgtatatgtgtacatatgtaagcatgtgtatgtgtttgtatatctgtatgtgcaaatgtatctggacactagttctgggtctcatttcttagcactggactagtgttgtgagtggtgaaattatttgacactgaagtgataccatattggagaaatactctctttagatggacttcatttgcctacatacatttttcctttgaggttaatccaagattttttttatagttttgaaggactaaaattgcaatgtgttaaattagaaaaacgtgaacacaaagctagatgctgcatttaatatacgatgttaatacttccttctctgaagaattaagaagaaaagaaaatcatatcaagaaggggcaaaaatgatcatacccagctttgtgaagcttctttcacttaccacgtttcgcttttttgtgtgttgtaaataaaagacacactggtcagatgaagattcttgtttaatgagatactggtggcatcagaattgcaaaagtgcacacatttagaataaaaactcctgaaggactggagtatctttgtcaggcttatggtgggagagcagagctttctctaagtgcattgtctattttgtttgtgttgttttttcctcctccaaatacaattagatactagaccttttagaagcatctactgcatatgtgctgccttgaagagaaactataaacaatagagcctgcgacagcctaatagatagatttccaatatccttaggtctgcagacatccactaaaggccgcccaaagtggcataggctccagcatatttataaatggtactcctacctgtcctagttttcctgcatagtactcattaagagaaggcaggcatccacctgcaatgaacacatcccaacacctggccatgtctttgtgtctgaataatctgattaatcaaagaaaagaacaaggttgttgatttaagccattgcaaaagaaatgattaactgtatgcagggcccattgctacacatcccctaggctcatagaagagcatggtatacctagagaagtccttactggttcccagcactctccgtttaccatccagatcctttattccatcccagatccagggattctggacacttatcccttcatctttcttctgtctcttccctctaccagcctctctctctctgtctctctctaggtgattccatctctcatggcaagagcaggcaccaaaacactccaccgtgtgacttttcttaatccaacttcttccttccagtaacagccaggtagtggccagtctacagccttggggaatgattccattcacagacacaaaccctgtttctgcctcatcctcactgttgatgttacttctctaatcgcactttctgatgggtgggcaagaatcacagctgaccttataggacaattgtaaggattaaatgatcatttttcataaaatgtaagatgtcattggatataaaatgtcccattattttatctgccatcagagaagaagaaatgctgcctgatacctaggataagcctttcattttcatatttcagagctgataaaatgtgacaagtggtgtatcttgtaatcaacaaaatagaatttaagaggatattgcatgaaagtgcttaaggtaacctggtttatttggtggataagctatttatgaaagtggttaaaagatggcaatatagggagttaagtgatgtaccaaattctgcgtggttatatgtgagggaaatttaaggaagggttttgtattggattgtaatgggattaaaactgacagaaaaagtaggctattgattgaagatgatgctggcttcctaagtgaatgatctccacactgtgttgtgatagcagcaaggacttctttaagatttttttattttttatttcttattttattttatttttttgagatggagtctcactctgtcacctcggctggagtgcagtcgcgtgatcccggctcactgcaacctccgcttcccgggttcaagcaattctcctgcctcaccctcttgagtagctgggactacaggcgcccaccatcacgcctggctatttttttttctttgttttttttttggatttttgtatggtctcgatctcctgaactcatgacccacccaccttggcctctcaaagtgcttggattacaggggtgagccaccatgcccgaaccaagatttttttttttttaagcatgatcatgatcatacaattcttgttccacttagttgttccatttgtttttcataattatcaaataattatagcatataagacttgaaaacattgaaggtgggtttgataatccaattctcgagaggcctagttctggccatcttcctaatttttgaaaaccacgaaaggaccatggatgcctttgcttactccagatgtgaaattcacctgaccattcttaaagattttctcagtttcaacactttaccactcccaaattttcaaaagaggttaagtatgatggattctctgtattaacaatgtaatatttttatgagctataaggatcacaaattagaatcaattttgggcctttattttctaatactttggttgagaaataggcatcttgcaaagtattcatctgttatagaaaggcatcaggattcctgaaatactttgctgaaaatgtcagtatgcattcaactttgttagttttctttttcagtgttctaatgtattttggatccttttttgtactctagttacttgaaaatagatgcatattttagagttataatatgaaatataacctggtgggacctcccttcatttctggaactgttatcccatgaccaaaatccaaaggaatggtcctcatgtgttattggtatattccgtattgaaatgaaataatcaatactacagtactaacacagtagtaccttttgtttgggggtaatttgcttagaattatgtgtttctcgtaagttatttaaaaatgagcttggtagcctgccatttgcctgatgggaatatcccaactttcctggagctacagaaaaaaacaccccacacattggcaaacaccaatctaaagttcaggtctttttatagtaacatagaagcaggcatatgaaatgattatgccacatatctgccagattttgacgtttaaaatattctctgttataaagccactgaagcagatcccaagccttgtggctggccagagtttctgcaataacaatctatacatgctaactaaggcagctgcctaccttggccggcaggtaggcaggcaggtaagtaggtaggtgagatctgctagttataaagaggaggagccaggctgcagggaaggagagacatgtcagtcaaggccaggaagtctctcccagagctggagttaaagaactcatgtggtcctgattagcagcctgtgttcagcactctttttctggttttaatcctactgggctagatcctctctcccctttgaagtcacagggctgccaggcagggagggccctatgcagcagcgtgtgtccattcaagctttaaccgaagggatgatgaaacctgccaacagccaagtcaagtgggaggacaaagatgtggcagggctgtgccttggtttgcttctgaagagcagcacttaactttagtgaccgctgttgtgggaatgggtctgtgaaaacccctcagcttcttcttactcccaaaatgtgtatgtgagagagattttctttattcatttgtttccttttcctgagctgtacttcatcctaggtgttcagcagcctttgttgagtgacaatcaacaaagtctttggggcatagtttgggttgctctgtcttttcaaaatgtggactgtatttcacctcttttgaagtgtttatcctgaagcttccttattttcagaatttttcccttctaatgaacaaaagcaactgaggggttgctttcaatattctgaattatattcccttcctcatttttgtgcaatattagctgtgagaagaattttaagatgcaaaaaaaggaggcatgcctcccccatctctagcatttctgagggttttttccttcctaaatcgatctcaattaactttgatttctttctttagaaaaccatgtgctgaaataatgctttgccagatgtgagaatggattccttcccctacaaacacacacttaagcttcattttagttctaatattttggtcttttttttattattcaaacttacactacatttttgtggctattggctttgtttgcagaagtaagcttactttatcttggagaaatactaatactttaaagttattgcttgtttgttattgttgcagccatttcctttttagtttgtaattttaaatttagcctgtttcttatatatataacctgttttcgccaatttctgatataaatcacacatttgttcatgtttctcatcatgggtgagccaaagctaacattacatagtgtgttattcccctgcgagccttggtcgagtctcaggcccaggaaggagagaggcagcagccatcagctctgtttcctgttctgagcctgtaaaacacactagccagtgccaccatgggaagggagtatctgttttgcaaaaattttttaataaggtctaatttttgtcttaattagcatgactaagtctatggtgctgattttactttgaaacccacatctatgtgtttagattccttgttttggccactcaattgtgactggaagagaaagccatgaatttcaggttccctaacatctaggatgccgtttctgtactgtcaacttctgtgtcactgcctcgtatcatttttggttgttgatgagtttgattttgctgtctattcaagatgacttttttcccttgtgcctgattctggttctctgtctggcctacctgactctttggtacattttgcattactgtttggacagcaggcttagtctttcccagggtgtcacagggctgtaattctacagatacttatggagtccaggatgggggcttttgctttagcacagacacctgaccaccactttgagagacagaggtttgagtttgttttgattcttcctccttgctgattctcagtgccgtgtgtctggcaaagaagtttgtgcacttgggaagctaaggaaaaaacttggtcctgggacaggtggaggatcgagcgacagagtagatgtggagttgggggtgattgtttcctaaaaattctgatccttctgggtggagaggaagctctccatctcagaagggctgcttctagggtgtgattactgatgggaagcacccttatttatgtaaaggtcatctcagagaaggggaagagggtgctaatttaaacacatgtcccaaaggaaaaaaatgtcacaaagggcatcatagggctgtgggggcaaggagaaggcagatggtaatacacaagtcattcccatcactaatcccctggttgatcatggccagctcattcaagattagctctagacctttctgggtctcagatttctcatttggagatgacaagtttggactggaagggtctgcgcagcccacactcccctgcctcccctgctctgcctccaaagttcttttctttttctttttttttaaataaaaatgtgtggcccaactagcctttgcttctcactagttgatgtcaatactgaggatgccaaaggactaatataaaaatgagcattcatgtggaattctttttgtctgttataagaaccaaaattggattgtatcacaacagctctgtgtcattgcagcacaagccatcatttaagtcgttgaaatttcccaaacttgccgttgctcattggctgtagaatataaacatagccattggctaaccacttgtttgacttaaaaccacgaaaaatgattgatccaacaatgacaaattgctatttcttctcaccaaatcatgcaaaagagcgaagatattaattgaaagtaaggggaaaaaagagcttgtcagtgatccagatattttaaacatcctgctgtttggaagcatctggatacttcacagctttttttttttttttttttttttttttggttcatttatcatccagatgctcaccatcatggaagcaccacttgaaactgtacttcggctaataacttagagtggaaacgtttgtatctttggttggttgccctttggtgctccattgatccctctgtcttcctctaagtccctcttccgcaaaatccccaggaatgtggcaattttgccagatgcttaggtgttggccttcagatttcttttttttaatcctcatgaccgctctgtaccctgtctgcttgaattatagattgcatttgtcaaatagtgacacatgcaattggatgtcttctaagacctttgaaattcaacttccttaagttgagattaaagtggatattctgctgccctgccacagtcaagcctgggatgcttcgagacctgcataaaagtttttctaggctggcatttctaactcttactgtcccgaggaaagaaaaacaagctacttttttcttctgaaaggtagaaatggagaccataaaaacgatctaaaatgtggtcccagttagaaaggactctgaaatcaacaactttttgaaacatgactgtctgttggagtgtcttgaattatgtgtttctttgggcattcaggaagccttatcagttgtgagtgaggaccagtcgttgtttgagtgtgcctacggaacgccacacctggctaagacagagatgaccgcgtcctcctccagcgactatggacagacttccaagatgagcccacgcgtccctcagcaggattggctgtctcaacccccagccagggtcaccatcaaaatggaatgtaaccctagccaggtgaatggctcaaggtaaggagacttccgcccctttctctccctgacctcccattttcctatcctttgcaaaggcaaagtggaagtcagtcatgcttctctaaagattgacttagaaagcaaggccactgtgcctgtaatcccagctactcgggagcctgaggcaggagaatcacttgaatccaggaggcagaggttgcagtgagccgggatcatgccactgcactccagcctgggcgacagagcaagactctggctaacaaaaaaaaaaaaaaaaaaagaagaagaaagaaagaaagaaaggccattgaacggtgacgttggacagcgctgggaaaatgtgttctccagtggtttgtgtagaggatggagtttgtaaaattagtagtatatttaccaagaactctctttgaagatgtgttcaattctatttcccaggcacgagggctctgtgggaggggagccttgcccacatatggcagaattcatctgaggtttgattgcctggaaaataatgccgtcttatgttttcacaaagggagagtgtcagctagtggccaggcagtgcggcgtatgtccaagccacttgaatttgctagtggatctccattgtctgccctccaccctcaccccaccctctgatctctgcggtcctcttctcttaatgcctgctgtttgttttttttttttttcctcctcttagcttacacataaagccctctccagtgtctcccataattattagcttccctgagtttgtcatgaacatacaactgtcacgtaaaatgtattaccaaatgcagaactgtccctggccctcaaaaagtgttgaattctgtgtagttttgaaaagtaaaattaatttcaattatgatctaataccccatatatattcaggaaaaagaatatcaaatcttaggataaagaacagattatttcttcgaaatgttgcataatctaccatcaggtcataagaacagctcacattttcggaaactttactgtgtacaaagcccttttatatccagtagcccctcagtcctccgagcagcccctcatgaagtatacttgaccccatttgatggatgaagaaacctgtgatcaggcatttccagtctgaccccaaatcaccacttaaatggaatcagagtttggatttaaaccaggagtgtttgactccacaccctgagcattttccactctgttgaagctgtaatggggcctttttgttacatatatgttttaacgctaaaaaggtttattataagtgtcatagtttataagtctggaaacggttgcgtcaattcctagtgtggtgttaatgaaggtgccaagtcacagtgtcctagagggaatgtcaacggcaaggctggacgtgccagatggggagatgggagatgccagaacactcctccactctgagaagtcagtttgcgtctgtgcatctgcttcttgaaagtgcactggctctgatgctacatattgccaccgcactggtcctttaagtggaactcgaggcaggcccatcttgaatctcatcaggagattcattcctggagttacagaaggacctgggtagaaaatgcaatgatgggtccaggacaccaaagttgtgggaaattaatgattacatgtaaatatttttgaatctcatcaagagattcattcctggagttacagaaggacctggatagaaaatgcaatgatgggtccaggacaccaaagttgtgggaaattaatgattacatgtaaatattttttacccataaatcctatgcatttgatacaatgtttctgttgatcattaactatatatatttctgaaacacagaagaatgcagggtaatcatgttctaaagaatgcagcagtgtttatgcagtagatcagttggtggaacacagcctggaaacactgaatgaattctgttttgggtggggtcatatgatcccatatatgccagcgtgatcacggcggagacactaagaccgggacacatttctaaagcttttcttctgcagaggctaatttctacctatgagcaattcacctgcagggaggagggggatgttggaaggtggggagagaggaaggaaacatctcagacaaaagggcactgagatgatttccgatggacaacaggcagagtgagccatgtcctggcccttgtttgagagtctggcctggggccagtctggattcagcaagcctccgaagggagactgagtgaggaggcgagaacagtgctccagaaatgaaagtttctattgttctcactgtgttactcccgaatttaaaataaaataagcattctggccgggcgcagtggctcacgcctgtaatcccagcactctgggaggccaaggcgggtggatcacgaggtcaagagatcgagaccatcctggctaacatggtgaaaccctgtctctactaaaaatacaaaaaattagccgggcgtggtggtgggcacctgtagtcccagctactcgggaggctgaggcaggagaatggcatgaacccgggaggcggagcttgcagtgagccgagatcgcgccactgcactccagcctgggcgacagagagaaactccatctcaaaaaaataaaaataaaaaataaaaaaataagcattctgtttgtgggagaagtgcaaacactgttttccttagtgtgagcctgtgatgccccttggtagctgatgtctcctctccctcctggccaggcatggggaagcttttccagcctgtgttgtgaccccaggggtacaggttgggagtttggggtaaccctgagccccaggcaaggggctacagtctataagaaagaaagacaccaggagcttcagtccataagaaagacaccagggcagttccgccccagggccctcagcgcagcagactggggaaagctcttgggtggtttttctgtcaggcaagtgaaaggctggtgctgcgctgagggtctctttccgggaaacatctttttcaggggaactggacattttctttcttttttatttttcttttagatggagttttgctcttttttacccaggctgcagggaagtggcacgatctcagcttactgcaacctccaccccccggggttcaagcgactcccctgcctcagcctcctgagtagctgggattacaggcatccgccaccatgcctggctaaattttgtatttttagtagagatggggtttcaccatgttggccaggctggtctcgaactcaatccacccatcttggcctctcagattgctgggattacaggtgttagccaccgcgcccggccttgacattttctttcaaggaaacaatgggaactttaagagttcctctctcagggctcatagaattctaacattgcccagattgctgccgtcataaactttcaatgctgttccagctcctaaagcatcggtgatgtgttttggtgggtggataccgagtgaagaccatcatgtcatcctcttcatcctccgggtcctccggtgggttcggtgatgtcggtttggcaggtgctgttcatgaagggaacaaggtggacctcatctgccttcaatccaggcctacgtgcctcctttgaggaaaagggcagctgggttgtaataggcaggggaggaacactggctgcagaggctgcctccgctttgaggcatctagcaatgtacagatgtcaaccagtcaccaagtgtcatcgtcccctacccacaaggatgttccagggggagggagaggagtggctgacactaatcccctttgtagaagagaaagatacagagctcatgcccgtctcccccagagctcagtgtgtctcctggcattgtgtctgggtgctggcctggtgtatcagttgggattctctagagaaatagaacttataggatatttttacattttaagatatttatttgaaggaattggctaatgcagttgtgggagtgggcaggtctgagatctgcaggggaggctggcaggctggaaagtaggcagaatttcttctgctctggaaaccgcaggctttgttcttaaggccttcaactgattagacaaggcccactcacattatctgacatcatctcctttagtcaagttcaactgactagctacctgtgcaaatgccttcccagtacaacctcagttagcatttgattaagtcactgggtgctacggcctggccaagttgacacaggaaactgacccccacacctgacttccagggatgctgcactcatcagtgactggtgacccattgtactttttagatctccaaaccagtgtgctctggggggccagttcaccgctgctgctggagctcagcctgactggacagcgggtggtaaagggggtggcgtgtcaggtcagaggttcactagggggctgctcaagctcagtgatctgaaagaattgaaacataagtggtgagtcagtgttctgctattaacaatccaacgggcttcctgaaggggaatgggggaaaagaaagctgaacagttatcagtggagctaagactcatctcagccagaggttggaggcagccttggggcagacaaaggactgcctgggatcccatccgcaggctttgctgactcactgtgggcttttttttttttttttttttttttttgagacagttttgctcttgtcacccaggctggaatgcaatggcacaatctcggctcactgcaacctctgcctcccgagttcaagcgattctcctgcctcagcctcccgagtggctagttttcatatttttagcggagatggggcttcaccatgttgtccaggctggtctcgaactccttacctcaggtgatccacccgcctcagcctcccaaagtgctgggattacaagcgtgagccaccatgcccggcctcactatgggctctttacgaatgtcaggtgcagctccataaaagggaacatgggcgtgattcactctgctttattttggacaccgtgaaccagcaccgggctgtgtcagcccagctcgaggggccagggcagaggcagggttcacggagacgcagattctgccacggaggggctcacagatgagatgctgcagagcagtgtgtggctgcctgcctctggaggagccccgccaggagtgcagctcctcaacgctccactacctgcacctgcatccttccagactcggaagccccaggccagctgtgccagggagttagcccatctcctggcccctggcccaatagcttcttctaattgtccctcctcttagcttatgcataatgggctttcctgtagtgcacatgccacttgaagtcaagtccaaggggaagttacgtaagtcaaatattactctttggctagaacttgtgggctgttacctttgtggcccctgactatcttgcagacacctccacgggagaagtgcactctctgcagcttaggtctttccagaacatggcccacctccttctgcctagaatacccagcttgggaatagtgccctctgtccatccctatccatccagtacccacggagaaaaaggccatgtgctttgagagaaaggaaggacttagttcccaaccgaatagtggaattctacaaaacctcagtcctaacgtgcttacaagctcctgaaatgaaatacaagtggtgaaacgagatctgttgccattataatagagtttctgtaaagcataataaaagaaaaacaggagagaaaggaaccactgctttgcgagccaactgggatgtccttgtgggtttggcttggccactgccagatcaaacagcagcattcttgcagacagtaatctaattgcacgttgtgtagacacaggacatcatttttcagcttcggtggtccacagccaccctctccctttcttcactctagcctcacgcaccagaaagccccaagtgttcacacaatggagaactgtcagtgtgtggccaaactaaaaccagctgttttcctgtgccatccacaccaagggcctggctgggagtttcagcgcctgctcagcctctcgtgagctccctaccaatgccctgaatttgctgtgaggtccccaaagctcaagtcatgatagactagcaggataagccaagaggtaacacctgctcactcatggtccacaagcaaactgtcttctcgtgagcaggctggcaggtctgtgcagagcaggctgcttttcctccatctgagcatccccagctcaggccagccagatcacaggcagcttacactaagtggcaccttcccctttccacaggcgatggcgatttcgtgaagcccacctggaggctcactgcaggtggaactcagtcaatttatgtgccatgctgtgagtcccccctcagcccagtctgcaggccacctggagccattgccatgtttgattctgttgagtgagggttcccccggtgtggtgattctcagcgtgggctccgggaccagcagcatcacctccacctgggagcttgtttgagatgcggcttcttaggccctgccctagaatcggaagagacctgggtggcagcccagcacgctgtgtttgaaggagccctctgcgggattccgatgcctggtagtctgagaaccactgctctgttgcacgatccaaggagatgaaaaatgagaaagcccagcagctgggtaaaggtgacccacccagcgaatgatctgggaggatctacgcggaggtggggttgttccccagaagtccttgcctgagttgagaaatacctccttccctcccgccacattggcgctttgcccagctgggcctgtgcagcgagagacaatgctatctgggccttgcctctctctgggatagattcattgcatgccatgaataactccagcctcgggtcagatagcaggatgttttatagatgttatttaaaaaacatgccatttgtcatgtgatggagatgagaaaaagtagggagtatctgctgggtccatcagggccttagacatactgtttatgcgtggagtcattcattcattcaatgaatatttattgagcacctactttcctagtctcttgggatagagtgataaaatatacaaaaaagttttgcctcactaagttcactttctagcagtgaagatggtcatgacatcagaccacttatgaaaacacagcaggttagatcatggtaaatgctaaggagaaaaataaagacgtgaagcggatggcagctctaaagaaggtggctggagaagatcacaaaaaagtgatgtttgagtaaagctgcaaaggcagttgagggagaatgcccgtgattaaacagcagaaaatattccaagaggagggaatgctaaatgcaaaggccctgaggtcagcttgaggtgttcgaggacaacaagcaggccatcgtggctgctgtttagtgtccaagaagaagagtaatagatgatgagtttggagagcccgtggggccattgccggactttgactttcactttctggtgagttcagaaatcattaggggacttgaggcaaaggagggatatagtgttacttagattttgcagggcctctctggctcctgtgttgaagtcttcctgagaaaatgtgggtgtaggatgggagacatctgcgtgagagtgggtgagagtggtagcaagggagggtgggagaggcagtcgcatcctgggtatagttggaaggtggaattaacgtgctttgctgatgggttggacatatggcatgaggaaaagaggaagcgaggatgggccaaggcttggggaatgtaccccaaacaaggtacggacaaaccataactaggaatcctcatgagcatagaggcccctttaagggccccttttaagcatcaccccagacactggggacaggaacttctctctaataaacaccaggtaaaacaagaggctcttgcctccttgcctgagctcagtggatcttaattcattagcccagtggttctcaaccatcgtgatgtggcccccagaggcatttgccaatgctcgtgtttctgctggtcacagctgggaggtgttactggtgtctggtgggtagaggccggggacatcctgcagtacacagggcagcgcccctgcagcccccacccccacctgtccaaagagtgacctggctccgagtggcactagtgtcgaagttgacaaatgctgcaggaaaccaacgtgtatttagtgtttaatctgcatcatggactgtgttagcttcgatggagatggattaagaattaagtgaagctggccgggtgcaggtggctcacacttgtaatcccagcactttgggaggctgaggtgggcagatcacttgaggtcaggagttcaagaccagcctggccaacatggtgaaacccccatctctacaaaaaatacagaagttagctgggcatggtggcaggtgcctgtagtcccagctactcaggaggctgagacaggagaatcacttgaacctgggaggcagaggttgcaatgagctgagatcacggcactgcactccagtgacagagcaagactctgtctcaaaaaaaaaaaagagagaaagaaaaaaaaaaggaactaagaggagctcatggtctaccaaaggtgaaaaagattctgtgagatcataagacacattcagtacagagcgatgttcagggcccagcaataacagatatgagggtaccatcaactctacctgggcaggagaaaaagaccctgaaagggataatattaacccatatttctaaaacccacatgatttattaatagattttggtatacaacatattgtccagttttctcaaacatctatgagatgacattattatgattattcacatttacggatgaccactgagtttccaaaagttttcgtcacttgctcaagtgaaagttagtgaaagtgaaagttggccatttgaccacaggcctggactcttcttcactccctcagggcttcttagaagaagctgaacgtctttcctgcattgagagggatagcaaggttctctccacgtgtcagacaagcagtgacaagatgcaccaaatccaagtgccaactgcattttgattttttgtatatgttacacattttagaaacatttattactatcttactttatcacatcaggtcagttcacctgcactcacctttacattaacctcaccaggtgtttccaaaacaatcacattttaaaaataataggtgggtcaggagttcgagaccagcctggccaacatggtgaaaccccatctctactaaaaatatatattaaaaaaaaaattagccaggtgcctataatcccggaggctgaggcgggagaatcgcttgaacccagtgggggcggaggttgcagtgagctgagatcgcgccattgcactccagcctaggcaacaagagcaaaactccgtctcaaaaaaaaaaaaaaaagaaaaaaagaaagtaaaattgttttggttaccaggattcacctggcctgttataaaaacatgaagcaccatactggctattgggctcaatcctttcttctctgaaaaaggagtctttcagacaaattaaaagacgtgcacaagatagaaaagatgtcacatctgatctttgtcatgtaactgcttgtagagatcttatgctacagaacattttgttttcaaatgatgaatcccaaaatggtgcatttccctccagttttcaagatctaaaagcaacacggtcttgctggcattcgtttttggctgtaaagagaaatataaacttaaataatgaaactttctcagggaaacatcgagcccctttaaggggacaaagaactaactgttggtgagctggtggtgactttttaattaattttgtcttcaactgcttcagggaagggggagggaacaggactgttgggaagaggctgaaattccaggtgtaagagagaatatttagtaagggtaaaaataacacacagctgtgaagacaaacatctacggtttcagtttgagcccggagttctacatgaatcactgctgagctccacccgctgctccagccatggggtctgaaacagcttttccactgcctctgattcagaaataaaacagacccacaaattaccctgcagcgctccagacaatcccctccttgtctggggtcctaaaaataccttttgtggtgactgacctccgattcacactatgaaacttgattaggagcttgctcagtcgattaggactaagtatatgcttttaggatccttatgaagaaaaccacctgagaagggatttatttgtattcagacttgagacaggcctggaatgcttgtcccgggccagcctccttgtgggggttctctcgcagaactgacccctttgccctcttagggtagagctgccaaagaaagcctttccatttcttccatgtggcttcctcaccaagttcttcttaatgtgaactaacctaataaaccaaaaggaacattcagaaagacagtgacattccaaaaagcagttgcatgctgaacactgcacaatagtaaaccttagcttcctgacctacctaagagttcaccgaggtacagttatgaacagttgccaagaacaaaaagcctcacatttacacccacatacacgcatgcacagccatgcacatgcagtatgttgctgtgttaatctgtatagtgcttcacagtttgcagactttcttcacaggcatcatctcagggatgtcctcacagcaacctcaagaaagcatccattcatttttatgaatgaaggagttgagcctcgaaaggttaggtgacccatctaaggtcaaccaaggtcagcaatggttttctgactgcaacacgaggggctttctcttgcactgcaggtatgagataaggaactcaatatttaaatggaagattcattcataaatgtactcactcatcctgcagacacttactgagaaaatacagagaatggtgcaattggaagggagacattcctctctggcggcccaggaaaggcttgtagagaacctagaggtgagcatggacaggtgaatagagcaggtaccaggtggtgaacaggtgaatagggcaggtatcaggtggtcataggccttgaaggcagagggagtagcaaaagtgaaggcctgaagggaagagactagggggtgatgtggaatgtggtctttgagcacagagcacatggagttggggagaggggctttggctactcaaatgccagccccatgttaatagagacactgatataactccagtacctggggcagtgcttggcctagaaagatgctccacagatatttgctaaacaaatgagtgaattgaggggctccagagccagatcactgaggagaatctagggaggggctctgggccatgatgggggttaggttggacatgggcagcttgcatttctgtttgggggagagcactctggtagcaggagggagaaagctttggaagagttcggggacatttcaccagcatgtgatggagaacaaggggttggaaagtcgtgtccaggtgcaagaggaattcagaggattaggaaggaggatggctctagaagaataggtagattttcgacaggattagcgggtttgcctccactgactcaaagaagaagacatattgatttccgcaattacattctgacttgccttggactttctccaaggagtgggcccctgctaagtgttctgaagtgagggtgaatcagatttaatgtggccagcgagcttggggctgcccctctgggatgtattcagtgccgttcttggataaatgaggcccattcacactcacaagggctgaggctccatgcttgtcaagctaatggccacggctgtgccatttcattgcgggttctttccatgacggaaattgcctcgctgtaagtagactctgatgtgagaaaaccaaagtcagatgccaagtttattttgtttttcaaagactaaagaccaaattttacatttctcagtatgttttttcagtaatattagtccccaccaccaaccccgctttttttttgtttaaggggtattatgtatggacgacagctcaaggaggctttcatcttggacttattttatttaatcttaaaaaattagattgactgcttccccagtggtccagctcctgtcctggtcctcacctccatctttttgggcctgcagtcagagtcagatgcactcccactcggctgtctcgtcatggggactttttgtctggtttccttttgcacttaagaatgtttgcccatcatctgtgtaaaacatgcaccctgctgggcacagcaatgaagttttggggagaagcatagaacgcttaactgcaaattgagatgactatttcttttagaccaaacttatcaaaacctatttatatctctacataaacattgccaccttccaagtctcccacggggccctgccttgctccttcgtggctgccctgctcagctcacgtctgtaaccctcatccatgactgtcttcagggccactctgaagatgttcttttagaatacttaatagtgatgaaattaagttttctgaggatccattcaatggtgctttaggtctatgaaagactcctcacacggatttaccaagcaagggcatagagtggggcggtgaagtacttggagtcgagaccatgactatctaggttcaaatcccaattcttccactactggctgtgtgatcttgggcaagttatccaacctctctgtgcttcatctgtaacaaggctcctgctttcgagtatttctgtcatggagatgtgcagatgaaatgaactaacagcaatagctgacacctggcgtggtcatgtgccaggcaccatgttaaatgctttatccatatgtttattataacataaacacgtggaaagagtctggagccatgctcatcattagtcaacagtgaaatactggttggaagattaaccaactgaggcctggaaagagttgtttacccacagtgcatttggtgctcttgggagacataaacatgaccctatttagtgttggtaaatttgaatttaaaatctagaaattaggggtttcagtgcagcagctcatgcctgcaatcccagttcttggggaggctgaggtgggaggattgcttgaggacaggagttagaggccagcctgggcaacatagtgagaccccatctatacaaataattaaaaaacagctgggtgtggtggcacgtgcctgtagtcccaactacttgggaggctgaggcaagaggatcgcttgagcccaggagtttgagactgcagtgagctataatcatacctctgtactccagcctgggtgacagagcaagaccctgtctcttaaaaaacaataaaatcaaatcaaatctagaaatttgggagttatgaaactagaggcatgtataacactgcatctctcaaggttttctccttttttaattacacgtttttttcatgtttttgcattgacttctctgacaggtctgatctttccaatggcagccagtaaggaggagaggctggggacatgccgtctctcatcctctgtggctgcagcatgtgagcactgtgtgcagggagcgtcctgctctgccaccagctacgcctggcacggtgcgggatggtcttagatgtattatgagatgttgggaacgatattgtttactgcataatccagttttcttcatgagaagccccgagaaaaactctcaaagcttaacccagggagagctttatttctgctgaataactggtttgtatgtagcttattaatacctcaaaccttgtcatcagatgcacttgtgtctttgctttggctagtagaaagctcagagttgaattggtatcctacctcagcaggataaatagtaagcttactcagtgggctgctttcatctcttaattcctttttggcccttgtttcctcatttttattctgttaattatttatgttatcattttgtcttatatgtatttttataagccaccccaaacttcacatagcttgcacacaggtaggggaataatggctatttaaaaccactatacatatttataaatagaactctggagttgcagaggaaaattacgaagcccctccctaaaaaactgttaacgaagctaaactcttgttcatccaagtggtttccagacagtcatgtctgggggcttgaaaatggggcttcttccagccctctgattcagtaaccctatgagaacccaactgggcttagcaacgtgtctgccttctctccttaactcaaatttaacaaaatttccaatgtatttgatattctttgccgtgtccttttctcattaattcagaatactagtatgttttaagaagtcagtgctcatgattttaaatgattagaacttaattctccaactgctgtttaagggagattattgtttgaagctcaacaagccagtttcattgggcacgtctccagttactagaagaaggacaccagcattctggttttttttatttccatcatgaatgtttggttgtcttcctacactatttctgtgttcctgtgagtgaccacagttatgaccaaatgccatggaaaagtgtgagattgctgcagaggttacactcctcaaggagtgtggcctgtagtcccagctattcatagggaggctgaaccaaggaggattgcttgagctcaggagtttgaggctgtgtggccccaagggtgttgctagggagttgtgaggtgttatggctggctttttaatatcccagccattgggctattgttcagttctttctcagaattctgaaccagccccccacctcttggggccccctggctaatgtggaatttctgctgctgtgagcagagggaagtatctgtcttcccagctcctgtttactcttgttgatgccacatattgcataggactgtcaagactaatgtctgtgggtgacaaatagaacctggaactgaaaatgtaaatttgagaataacagttcatgaccaagaatccaaaagcaaatgcaacaaaaacaaagataaatagatgggacttagttaaaccaaaaactttcttcacagcaaaagaaataatcagcaaacagacaacccacagagtggaagaaaatatttgcaaactatgcatttgacaaaggactaatatccagaatcgacaactcaaacaaatcagcaagaaaaaaataaataatttcatcaaaaaatgggttaaggacatgaatagacaattctcaaaagaagaaatacaaatggccaacaaacatgaaaaaacactcaacatcacttgttatcagggaaatgcaaatcaagaccacagggtgataccattttactcctgcaagaatggccatcattaaaaataaaaaaaaaatagatgttggcatggatatggtgaaaagggaacacttttacactgccaatgggaatgtaaactagtacaaccactatggaaaacagcatggaaactagtacaaccactatggaactagtacaaccactgtggaaaacagtatggaaaattagaagtaaaactaccatttgatccagcaatcccaccactggttatctacccagaggaaatgaaaaagacacttgcgcatgcatgtttatagcagcacaattcgcaattgcaaaaatgtggaaccagcctaaatgcccatcaaccaatgagtggataaagaaaatgtggtgtgtgtgtgtgtgtgtatatatatatacacacatatatatagacatatatgcacacacatatacatgtatacacacatatatacatatatacacatatatgtatatatgtacatgtgtatacatgtatatatacacatatgtatatatgtacatgtgtatacatgtacatatacacatatgtatatatgtacatgtgtatacatgtacatatacacatatgtatatatgtacatgtgcatacatgtatatacacatatgtatatatgtacatgtgcatacatgtatatacacatatgtgtatatgtacatgtgtacacgtgtatacatgtatacacacatgtttatatgtgcgtatgtacatgtgtatatgtgtacatatatatgtatatgtgtacatattatatatgtatatgtgtgcatatgtagatatacatatatgtgtatatgtacatatatacatatgtatatgtgtgggtatatgtgtatatatgcgtgtgtgtatatacacacacacaccatggaatactatgcacccatgaaaaggaagaaaatggcatttgcagcaacttggatggagttggagaccattattctaaccgaagtaactcaggaatggaaaaccaaatattgtgtgttctcacttataactagaagctaagctatgaggacacaaaagcataagaatgatacagtggactttggggactctgggggaagcatgggagtgggtgagggagaaaagattgcacactgggtacagtgtttactgcttgggtgatgggtgcaacaaaatctcagaaatcaccactaaagaacttattcgtgtaaccagacaccacctgttcccccaaaactatttaaattaaataaaaagacaaaatgatttttgtttgtcctcaaaggagtctgtgagagcaatatcttgaaccacgcttatttgcaataaagaaatttccaccccaaacaaaaagacagatacatttaatatttactaaatgattatctgtttgacaggcacctgctgaatagcctgagaatattctcaggaactgctgcaacacacatatgcaagtatgtgtatgtttaaaagtatgtgtatgtttaaaaggtaactagtcttcatttcaggaaggcatcagggactccctgacccatacactactctggtttaaagtgtacattgcagcactcatcctgacacactgtcctacttcaggactgttcattccctgcacagcatactctttgtcatgtgcacaataaaacaatgcattgaacgtccaaatccttatcatgtgagaatggagaacacgtggtcctctatgctgggcagcgcttggtgcaggtgacataccaagctgtttgcgggaactttttcccggcgatgtgtgagcctcggaatgcctggtgaaggtggggttgcagtggagtaatcaagacacacatttgtgcagtgtggatcttttcttgggcacagagctagaaatgtatttatagtgagactttcaaatgaacacttttcagttctctgaattgtgataaaatttccttttctttttttctctcttttgttttttttttgagacacggttttgctctgttgtccaggctgcagtgcagtagcatgatctcagctcactgcagtctcaacctccccaggctcaggtgatcctcccacctgagcctcctgagtagctgggactacaggtgcacaccatgcccgactaatttttgtattttttgtaaacacatttttcatgttgtccaggctggtcttgaactcctgagctaaaacaattcacctatcttggcctcccaaaatgctgggattatatgcgtgagccactgtgcctggcgtccttttcttaagtaaagcagatatctctgaaaattcttttcttctccaggaatcactcctctttcttatttgcatcttgtatatgtgccctgtttgtgtcatgcacatgcttttcagggaatgaacagtcccagggtaggagagtatgtcaggatgagtgctttagtgtacaccttaaaccagagtagtgtatgggtcagggagtccctgatgccttcctgaaatgaagatctagttacctttgaaaagacattgtcttgcctttactttgtggagtcattctgttcagggttaagaagcagggatggagagttcgggccacccgcactgaagtctcattctacctcctcctggctgtgagtcctggagccagccccttgtgttttgagtactcagttcacacctctggaaagtggagacaatgccagcaacacagttcgctgtggtgaagactgataactattaagctcccaaaacagatcccaaacatgttaaggctactcttttgctgttaaaatttgcaagagaaacctgggtgaagtggctcacgcctgtaatcccagcaccttgggaagccaaggcagaaggatcaccttaggtcaggagttcgagaccagcctggccaacatggtgaaaccccgtctctactaaaaatacaaaaatcagccaggcgtggtggcaggcgcctgtaatgccagctacttgggaggccaggctggtctcgaacacttagcctcaagtgatctgcctgcctcagcctcccaaagtgctgagattacaggcatgagctgccgcaaccagcctgaaggatctactttaatgtcacagagaaactcttgtgatctatgcctagagttcttgtcctcggatatgaaaattaaactagaaagaactaaaagaaaatgaaaaaggggttggtctgaagggttcaaaatcctcaatgtcccctgtttctataattctttttttttttgacatggagtcttgctcttgttgcccaggctggggtgcaatggcgtggtcttggctcaccgcaacctccgcctccctggttcaagcgattctcctgcctcagcctcccgagtagctgggattacgggcatgcaccaccacgcccggctaatttttttttttaagtagagacagggtttttccatgttggtcaggctggtctcaaactcccgacctcaggtgatccgcccagctcggcctcccaaagtgctgggattacaggcgtgagtcaccacacctggcctgtttctataattttatacatctctttgatcttttacttttcaaattgttaactgcgttgttggagaagaaagaattgatgggacctggtatacggccggcacttgataacagctgtctaaatggatgagtgaatgattgaatctgaacaaaggttgtctagattttatagttgttacttgagttactcacatcatctgggcaaagtctttttcctaaagaacctaatccctctaacttctcttccctggtaacttctctccttgagacaaatataccaaaacatatacactctactcaactgatggaattttccagaggaataggaaactcagtctaagtgaagacactctgtgttttcatattaggatgggtcttttagagataaatgtgtgaagccaggaaaaatagcatcaagaggaaataatgcatgtgtaggcagcggtggaaatattcaggatctacttcatgggaactcagaccattattattttaaaatttccttcatgttagcacagctgtgaggatgccatcaggcagggctgtgcattccaggcccatgttagggcctgagtcctgcgtgaccctgactgtaacctccatccgcagatggcagtgtaccctcttcactgccaacacctaagatccctccataggcttcagacacatttgtaagtgatgctgagaacaaacctatattttcaagttcccacatgctgaacaaacactttcccttcctgtccacatcccagctatggctttcaggtgtggaatgaccttctccatctcaccccactcagaaagtgcgctcctgcctcagatggttttgacctccttagacttgaagttcacatccatgccaagcccatagttttttgattgtccaagttctctgcagaactccaactaacaagaagtggaggagataaatgaggcttcattggcgtggatcccacaaccagaaacactgggatagaaatctaaaatctagagaaagcgaaggttcccagattccaaggaatatgaaaaaaatgtatgcattggatagagcctgagaggcatttctggaaatccgccttagacaacagaccctaaatattaatacttctcagctacagtgaccctgggtttaccatctacgtgttaaccatctaagaaggcactgacatgtattttctgttttctgcttaagctggattttctctctcttttctttctctctctttctctctctctttctttctttctttcctttcttctttttttgatggagtttcactcatgttgcccaggctggagtgcaatggcgccatctcagctcaccacgacctcaacctcccaggttcaagggattctcctgcctcagcctcccgagtagctgagattaaaggcatgcaccaccacttgcccagctaattttgtatttttagtaaagactgggtttctccatgttgatcaggctggtcttgaactcctgacctcaggtgatctgcccacctcggcctcccaaaatgctgggattacaggtgtgagccaccactcctggccctaagctggattttctttttagcatttccctatcagatgcgatttcaccaatgtcctgtagctttcacaactcactgtttaaaatgttttccttttctttttccagaaaggtaggtttgactttatccaaatgacagtgactgccttactaacagcagccctgtgacctgttgcccacggtcagtagtcagtagctgacccctctctgcatccacacagttccttccctatccctttcccaagggtcctctaggactgctggagtccactccccatgaggcctcccctagcgtcagtcctcacccttccctgcccttcctgtctacacctaagcctggaacactgtgagtcttcaaagctccatatgtaaagattggctgcagggatttgaaattgagcaggaggatttcattctgaggttttgagaaggaacgtcgttccaggataaacctcactgagcagcgagtgtccctggtgccgccccacagcatctgtctactctgcctgtttgctgtcacaccgcgagaacaaagagcagttcactgttccctgcaagtgtccccaatcagttgtcacagatggagttttgacatgacagtttcaggaggagctgcttaagaaacagaagccaggtggtagttccgcctcccttgtgcgtgttctgtgcatctagccagtatgggcactgtcctagcctgtgcaggctgccttcacagagccccacagactggctggctgaaacaatgggactcgagcttgcatacttctggaggttggaagtctaaaatcagacaccagcagggccagtctctggtgaggtctctgtccttgggttgcagatggcctggccaccttcttgctctgcccttacatggcagagagagagagagagagagagagagagagagagagagctcgagctctggtctctttcttttctaataagggcactaatcccatcgtgggactctaccctcatgacctcatcaaactgaaattacctcccaaaggctctctctcctaatatcatcacattgggagttagggcttcaaaatatgcatttcgggaggacagaaggcaaggcctgttttcggcatttcttttcttttcttttcttttttgttttgagatggaatcttactctgtcgccagtctggagtgcagtggcatgatctcagctcactgcaacctccacctcccggattcaagcaattttcctgcctcagcctcctgagtagctgggactacaggcatgcccagctaatttttgtatttttagtagagacggggtttcaccatgttggccaggatggtctggatctcttgacctcatgatccgcccacctcggcatcccaaagtgttgggactacaggcatgagccacggcaccccgcctgtatttggcttttcacacttgtcctttctcccccagtctcttccgccttgcccttctttggttctctctgtgtattgtgagaagtcgatggagacatgctctttgattgctgttataatggaagaatatttcttctcctccaggaactctcctgatgaatgcagtgtggccaaaggcgggaagatggtgggcagcccagacaccgttgggatgaactacggcagctacatggaggagaagcacatgccacccccaaacatgaccacgaacgagcgcagagttatcgtgccagcaggtcaggtgcccacagcttcactgccctcggcagatcgcaacttccccaaggctaggctgagcctcagggagctcttctcccccacctgtggcattgatcacatctcctttgtccagagcagggcttgtaaatgggagctggcagaggtctatgcatgaggacatgttcacggatcgacagcaaagcaagaaaaatacacctgtatttaaaaatacaaatatttaaaaaatatgtgagacagcagtatgtagccccagctctttattttgccacatagagaaaaatacacacacacacacacacacacacacacacacacacacactacgtatggagagagacagagagaaagaggatgtccaggcaaacatgcagccttgcttgtgtgcacacacatatgcacacgtgtgtatatgtctatgaaaggtgacctttctagggaggaattgccacttcttggagattattgttccaaatatcctgtccttcatgaggtactatttatgatagatgatagacttgtttgtttttaaaattctcttatctggaaaaataaacatgtgggagccatatattatatggctgtcttacgtgttcccttaagcatctaaaattccagctatcactggcctgtaatacagattctaataaccagagtaactctttaccacaaacataattcaaaaccaacccaaaggaatagctcttgaacttgaaagacgtgacaagaacttatttatttagccaaactaaaggtaatagaaaaaatgacttaaagctcctcagaggatacatgctacctaaagccagaaatataagaacaacagcaacagtcaccagtcagtgaacctttaccctacaggaggcatttggataaatgctttagaaacgtgatctcaagcaatctttgcaaatggacatctttctcatgatttccctgatgaggaagatgaagttcagagaggtccaccaacttttccaagggcattaggctaataagaggccaagttaggactcaggcaggtctgccttactcctttagtctctgcctgttggcattggattaaatctcagctgcttacagcaatttctgtgggttccctcctgttacttgtttcagccatctggtcaccctgcggtcctgcctcagggatttgaatttggcgtcagctcagcctgaaacccttaattccaggtagttccatatcattttccttcaccaagtatccgtgccaatgtcatggcctcagggaggccagtcctgagcacttccgtctggaattgctctcgtctccacctgtgactgccagtctcctgttggcctgatttttcttgatttcattcattcccttctgccattatattgcatgtttatgtaaaagttttcttactggccagccatggtggctcacacctgtaatcccagcactttgggaggctgaggcaggagaatcgcttgaaccagagaggcagaggttgcagtgagccaaaattgtgccattgcactccagcctgggcgacaagagcaagactccgtctcaaaataataaaaataaaaaaataaaaagttttcttattatcctcttccctgaatggaacataagccccacaaaggccctatctccagggccagttgcagtgcctggtaagtgggaggtgctcagtgaatattaagggaggtggagaatggatgaacggacacctcaccactgagctgcactgtacaagttactccttgttggcaaagtagccaagggcatgcatgggtgaaatctgcacaaactcaattctcccttgctcctggggtcacctaaattaatatctgcgaagtgtgatggcaaacaggttagattccctccatggtgtgactttccctttacctgagttggatcatgcccagtgggcttctgtcaccttctagacagaagagttcaggagtgcagggtactttgcaaaacatctggcctggatttgaatcccaggtttcagcttagatctgtcaccatgtgactttcagcaaacacgtaaagctggttcgatgcagtggggtgtgaaagggaccatcctttggggttgtgcctgatttcaaagcattttttaagacttacaggagacactgatggtagattacgaaagggagaaaaccgtccttagtatttactgaaaggcagttgacaggtacagaggccatgcatttggtttgatcttgacaatgcacctgaatgcctgagactgcctcacttgctgctgtgcctcagaacagggggctgttcctgttggatgggaaaaatagaaacacaaatgtcccaggtgcccactccagatgtgtggcacataagaaaaactcgaaggctaggatgtgcctggaggagaggcaggagggcagtggtgtgttgcccagacactctctgggcatgaacaaagtgaagtagacacccaaaggaagccccctaacccatctcaccctttgccctcctccttaagaatgtaatttcttcaaaggagacaaaacaaagtgtttagatctcaaagatgagagaatccatctgagggggcctgcactgaagattccttgcttggttcctcattgaatcacagatgtaagaggtaatgcctggtaccatcttctaactggtgaggctgtatttccatgaggccatcaatatgctttgatgtcataaatatccttttcagtagggccagacttgagtctttctacactaaggaaagtatttagaaaataagagagatatttgtgtggggaagagaacagagaatcaactgaagtcagagcacccaggattttttatacatagtagctgctcatcaaatattagctggatggatgcaaggatagctctgcaaattggcttatagtaagctttgatgtgaaggctgtttcctttctttggagcaaagtactcttctcttcagctcttccctccttcagttgcttcacgccagtgtaggcagttattcagttaatagtgtttgtaagagagctagttgtggctgattttgcaagttgtgagtctttcagttattggtcaagcttcatgtatgtgtgctcatacacacacagagatgaacacacacacacacacacgcacacacacacacagcttcattgcacaatctggacaattttccaatgtggccatgaggttgcaggacctcaggcagctgtaccagctgctgtatccatccccatggtatccaggcacctcactaaggcagatttggggcacggagtaccccatgtgtgcaaaaagaattctccagacctggtcctgagtggttcacatagaccttactacttagagacattgcttggcactaatgcaaatcacacggatagctgagtgaaaaaaaaaaaaaccatcagttattcctaaacatttgtaccatcatcaatacatgccgatgtttacacactagagatagcagtggccctaataaacactgatgaggaaatttgtactgtacggagactgagagataaaaccacagaggagctggggggctttgtccgtgttcagattgggttctggtacctggaacccacttttgagaagcgattccctcaaccctggttttgatactcatgatcttgagttaataaagaagcccataaaaaaagtgtcaaaaaaaagcccataagaaagtgtcaactagaaaatgtccctgaaggataaatgtagactgtcacttgatatatttacactgcctcctatttcagaacagatttaagaaagctcacatagatacatatgaaagagcacggtagaatccactttttaaaaataaaggaatgtggagaatggactaaagtaaaaattgaacagagagagtaaaaccaggagtgaggtttacacgcacgtgtgtgtgtgtgtatgtgtatttttaattgcaacatttaaatattgcagaattgcaaaaggtaggtgttatttggcttcgaggtatcatcaggcagtatgaaagggataattcagtgcctacaggataaaaagaaagcaaatgtgaaaagatggtccagctattaattctgagtctggaggaagatgtgttcctctgtttgtcctaaggaagataaggggagtcatgagcaaagcattcaaccagtagcgccaccaggcattctgggcagccctggtttgtgcctgttgttctggcaagactgttgattgtgccttcccaaagggtactggttaggccataattcccatctctggtttttatctatgtatttggtgcgagtatctgtaaatctaggaggatctctcatagggcagggcagtctcttacactgtcgtaaacccaagtgtcattcagtgaaaccagttgtaataagaggggcctgacaagtgtgacatcccccatgctggttacatggctcttttttggccgagcttaatttggaggttgactagaaagtgtttttctttttctttctttctttttttttttttttttttttttgagacaaagtctcgctcttgttccccagactgaattgcaatggcaggatctcagctcactgcaacctctgcctcccaggttcaagtgattctcctgcctcagcctcctgagtagctgggattacaggcgcccgccaccacgccaggctaatttttgtatttttagtagagatggggtttcgccatgtttgccaggctggtctcaaactcctgacctcaggtgatccgcccacctcggcctcccaaagtgctgggattacaggcatgaaccaccacgcctggcctagaaagtgtttttcaaagtatggtcagaaccacttgtatcaagattacctggaaaatttatgattaaaaatacacatttcctgccagtcacagtggcttacacctgtaatcccagcactttgggaggccaaggagttcaagaccagcctggacaacatagtgggaccccatttctacaaaaaattttaacattagccaggtgtagtggtggttcctgtagtcccagctacttgggagactgaggcgggaggattctttgagcccagaagtttgaggctgcagtgaaccatgattgcaccacttcactcccaccaggaagccagagtgagaccctttcccagacacacacacacacacacacacacacacacacttccaaatgttccaaacctgggtgtggggttggaaattttacattattaacatgcttattgtgtatgtaattttcatgtacaataaggttgaaaagttctaatctagatagaagatataaattttactttaatagacttgaattatttttaataaagatatggtttatcacttttagaaaaggcaagtagacaaaaaggaaagatagaaatgattaacagtatcacattaacattccaaaaaaaaatgaagaatcactcattgcagtagttactgttactctttaggtgttggctgtgaacatggagatgtgctaaccaagtggctaacaaagaggaaggcacaggctccattcacttcttaaaagttgcaaaatgctgaccaaaatgcaataggacctctcgctttagcagcttatagcattttgaaagatttctctttttctgtttttttattattattttttatttatttatttattttgagatggagcctcgctctgttgcccaggctggagtgcaatggcgcggtcacggcttactgcaacctctgtctcctgggttcaagcaattctcctgcctcagcctcctgagtagctgggatctcaggcgcctgccaccacagccagctaatttttgtatttgtagtagagacggggtttcaccatgttggcaaggctggtctcaaactcctgacctcagatgatccacccacctcggtcacccaaagtgctgggattacaggcgtgagccaccgggcctggcctctttttctgttttaattccttaaaataggtgctaaagtgttgagtttttcaaatgcctctgcttctatttttaaaataattcactttcagcatagacccttgcaataatcagtaatctcagagataagagtagccacattcttctcttcactgtatctcttcactttcttcattattaattcattcattaaactcttactgtgttccattcaccgtgaataaaagctctaatgagatttaaaatcaccttttcttgcccaccaaacatgtgtggctgaagctacatgacttgtgtcttactcagacccctgtgctaggacctttctattccgttagaaagtgttcatggagttcccattactcttaatcactgaggagatgaccgaaggctgtcagaagtagctaagacccacccatgtggggtaagtagtttttgacagacaggagaaggtgtgattgagagctcaaatgaatgactcagaccagtatttcagagcatgtgaggaatggagattgctatgacaggacgaatcaagaacagcttcatttatacccacgatgatgtgatttcgaaagccctttgcagcctctgccgttttcctctgccacatccccaactcacgcgctgcattttcaccacccggtgtccttgtccctgcggttccctctctggaatgctcttgctcattcttccagacatcttcaaaatctgccctgtcaagggagccatgcttgatcctctggcaaattaatcactcctcttatgacatcttaccaattattttgttatcatactttattttgtttcatattgtattctcaaatgcatgtatatacttacttaaatgtggatattctgcaaaggatttgaggtgccgtgtgaactaaactactgatgggcttatacccaattgacttatcaaatggaaattaggaatcagtgctaaggcagttaaaaatacaaatgagaagccaagagcatgtgagggaagaatgcagccattttgaccacaagcttgcccaagatgctgtacttaagtttctagtatggctttgagcttcctggcagccaaaatgaaaagagttatttggggaaataatttttcctttcaaaaaagaagtttcacagggaaggcaatgtttatcatagtgtagaatcctaaaagaaggatcccttttggggccactggggccatagacctgaccatcgaccgtcttcctgccacagttgcagcactgcatttcaacagcttatttcttgtgacatcttctgtgagcgctgagttacattagagaatagctcagcacaggtagaggacagacacccagcatgagtctttggcagtctgatttcatgtaaagaagggatcttgagttctcagagtgttagaggactgcatagtttccacatgatcctccctaaatattgacattcccccactgggctttgaaagccagtgaataacaagtaatagaacataccctccgaccaagccctgatggctgatatattatgtttccaatcctcttagcgtgagttatttataagcctgtctgttctattagattgtaagtttagtgaggtgatgatcatgtcttttgtgttctcaatcgccagacaacacagccagcacttggattctgtgtggaggagagtaaatgtgatttatcaagttaacagtaatctagatctaactagcaggaatcgcagactcgcaggggttgcaggattcttggtggtctaagttcagtcttcctttaaacatgagaaaaccaagactgagagaggtgaaatgactttcccgggaacacttgcacaactgggtgagaccagagcctattctcaggcccagaacctgctggtgaaatgacttgtgtcttcatctttctttgttacgtccctgaacacacccgaggatctcttccactctgtcgatatgatgggacatgcttctttaatcttctgtttaaattcctgctatgctcaaacaactaaataacaaaacccactaaaatagaaatgctaacatcaaagtttattatgtgtattttaaagttatcagctgaatagcggttgaggaaaccaccattgggttaaatgtgaggctaaaatcaagtcatttttctaaaaagcaacgacagctactatctattgatatgcactgttgtcaggcacttggacatgcactttgtagaaaaggcattatctcatttaaatcatgcgaccaccctatgatgtaggtactcattatcattctcactcgacagtaaagaaactaaaactaggaacgctaagagagttgccaaatatgtcacagccaatcatttgaagagccaggattcgaacccagttctttctgactccacagtctgggttcttcttcctaagctgtgctgacaaaaatacccaggggagaacacaggaatgggatgagagaatgtgtttgttaaattgttgtagacattctgcaacagccttttcaaataagacttaagtaaacaaaggaggtggagagggaattttgtaaaataatctactgtgttgcccagggctaatttttacatttctacagtgctaatgatgttatctgtttttcttgaaagtcaaagagaagaatggaattgaagacagcttagatttagcatgagcagctgggtaggtgttaatgaatatacaaaaaaaaaatgtttaaaataggtgatttcagtttggttcatcctgtgtttaagatgcttctgggacacctgtcaggcagtgtggtgggcctagagctcaggatggaaagtccttgatcgggagtcacagcacttgagttctaaactctgccatgtactaactgtgggatctgggaagctacttaatcttgctgtttctcaggtttttcatcaccaaaatatggatgataataattcctacttcatgtggtgctatatggattaaatatagcaatatgtgtgacatgcttaaacagtacctgggataaaaagtgcagttcttctgtttatatttgggtctggcatctgtgagagtgccctggggactcaagatatagactggcagaaacagctgcctgttacaggttaaaaaattgtgcctccctcacaagatatgctgaagtcctaacccccagttccttagaatgtgaccttatgtggaaatagaggttttgcagatttaatcaagttaagatgaggtcattagggtgagcctaataaaatgactggtgtccttacacaaaggagaaatttggacatagacacacacagagggaagatgatatggaaacacagagggagaactccatgtgaagacaggcagaggttggactgatgcaactgcaagcaatggaacattcaattgctggacagcaccagaagctagaagagccaaggacagattttatccacagtctcggatggagcaaggccttgctgataccttgatttcagactttgatcctccagaactatgagacgatgaatttctgttgtttctaagccacacattttgtggtacttggttacggcagccctaggaaaataatacagcatgcatgttatagttcaaacatgagagcaaataagaatgcccaaagatacatatggagagaggagaggggtagaccaaggatgaaactctggggatagcaacatttaaagagaagacaaagaaagaaaacccaggcagggagaaacctttatgtggaacaagccattgcatttctaaaacatgatgagcacacacaatgttgtcatggaataacaggaggcaacaacaacaaaagaaaacaaagaacaataacgatcattatccaaaaacaagatgattacttgagaatggtttcatccagagaaataaatcagtgtgtcagaatgacaaagctatgtttagagcctaacaaaaataatttagtcatgtatttttaaataaaatacacagaattgtagattctcaaacaagtagaggacaggcactctttcttgccatttttgaatctttcatagaggattatacaattcatataagtaatttttgacaattgattaattaataaatgaatgaagtaaagcataacatgagttaggatgatggctgcattaaaaatgaaaactattcaaagtaaataggtaaaaagtatgcagagagggctcttggttctagtaaaatagagaggttactataaaaggacctgagaaacattccttttgcaaaacacctggaattgctgcatggagtttaacatccttttaaatgcacagctgaactgggaagaaaggcaatgaactccttagggactaaaataaggaaaaaagtgagaatagagcagagcagcacattcttatgttgacacctggttgtcctaggttgctataatgcagagatttgggttttaaaggtcaactaggggcaaggaatgaaatcttgagcttccacaaagcagagaattggaactgagcctgtcattacccgagtccccaccccatacacacaacagtgtgtgccaggaactctaaggctgagaaattaatacagaaaaatggtcatgggctagtgataatctgggaaacctggcagaagtaaatacgaaatcttcatggagagacatgtcttcaacctacgctgtacagaattcctgcagatagagacccgctaaagatgactctgccacccgcaaattacaaaaaaatagctgaagagagatctcccccaaccaagatttaacagaaacaatgaacatgattaagcagaaggttaaataattaaagtattggataaagagtataaaataaataaactttttaaatattaaggaagaacataaaagaaggagttaaaaagagagtttgttgctaattgaacctcacttcagataataacaaaagatttaatttaaaaaatggatcctagaagaagggagtgagatacaggaaggaaatgggagcaatgaaattgattaaggtgagggtagatctagaaagaaatggctgtaaaatgacaaccacagcctccctaagtagggagtagaaaattcagtggagtaaaaatatgagggaacattgtcatgtaaaatcagagatggatgattcaagtataagctttctaaattactggtaattaaacttagattttgtttaaagattaacaggaaagagaactagaatgtcaaagagcaaaaccaatacagaaacaaagaaaaaaaagtgaatgaagaaaagtagatcaatctgattagacacttggcaaggagaaatagagaatggactaagaaagtttaacataaagcacaaaataagatggtaaaaatcagatagatcagtgataataagtgtagatagaccaaatttgccattaaagacagagagtgatagactagactaaaaaatactccacaatcagttatgggttgtttacaaaaaaatcttgcacaaacaaagattgagagttgacagaataagatacgctagtgaaaattgaatttttaaaaagctgacaaaaatagaaatagaaagcagactaaatatactttcaggcagaaagcataactggagataattgagggtcattacatagtgaaaaaaggctaaattcatgacaaatatataataatgataaacttacatgtacctaataacatagccttgaaatatgtaatgaactgcaaaaagaaatagtcaagtccaatttagtgagatattttaatttgcatttctcagtaattgataggtcagtgacattaaaattaaatacaccttaccaagagttttttttctagaactctgtactcccaaattagagaatatgcatttcttaagcaatcaaggaacatttataaaaactgaccatgcactaggccgccaaaagagtaacaaaccggaactttttaaaaagctaatttcagctgggcatggtggctcacgcctgcaatcccagcactttgggaggccgaggtgggtggatcacctaaggtcaggagttccagatcagcctggacaacatggtgaaaccccatctctattaaaaatacaaaaattagccacgatggtggtgggtgcctgtaatcccacctattcgggaggctgaggcagttgaacctgggaggcagaggttgcagtgagcccagatcatgccactgctctccagcctaggtgacagagcgagacactatctcaaaaaaataaaataaaataaaatgttaatttcatacagactctattcactggccaacgtgcaataaaattagaaatcaataccaaaacaataaatgaactctacatataagttagaaatttaaaaggctcagaaacagtcttgaggtaggctctttatttgagatcaaatttccatttgtgatggagtgaatcattgctcaaatttaagccagttctctctattgggcctgctttataaatgtaacttctgtcctcctgaggatgcaagatgttaaatcttatttttgcaggcttatgagtgtcttggacagcagattggctgacttgcccagggcctggatttataaacaaacacctcactaggcttgtgatatggcttagaggtacattttagtttttattttttgatgtttttttcataaccaagagtaatttttttcttttgggaagccaatattttacgttgatattatttaagaaaaataacattcaggactttcattatcaccagtttggcttttatttaatcttactttattcatttctctagaggggcctctgaaagaagatgtttgcctgtgtgaggcattttgtttcacaaaggcacagtttgtctttggcgatgcagtgcccctttgcctgatttaaatatctactcaatattttcctggcaacaggggaactctactaggtcagaatcctgtttcatggaaatattttttttaaatgtcagccttcctccctccctcccactgcttatacccccactcccactccacatacagagtacattaacagtacaactccagaactctgtgtgtaatggtttacttttatttgttttttaaattccaatttaccaaagtagatttcataataaccatgtaacttaagatacaaataagaggcttcagagagtgatggcttctgtttagcctgtgccatgacagtttaccattttggtgtccatgacatgtagaatgatgacacagatgttttcaaaacaattggaatggaaggctgaaaatgaacaacttatcttcaatggcttatgattcatctgacagaagcatctccaaaagtttcttaaaataaaattataaattggacttttgtgtcttaaggaggaggctgcccctgtgataacagattttgttcttattccattttagcagagtttgcaatgcaaaatcgagtgtgtggatgcattctttttttgcagtatgttattgttggcaaagtgctttcacatccattatctcatttacttttctattcccctaacatttcatttaattacccacagaaaaatataaaacaaattccagagaggttgacgtttacgtccagtaaatggttgaataagaatcccaatgtgggtatttggattcccaataaagccttttattttcatcaccaagttttctgtgattggtgttatttaagatttttaaaaatttcttagaaattttcaattactctgaaatctctaaaaatgaaaatccaaccttgttagcaagactcaaggaccttgttgatctgagcccagctttcatccccatcctcgtatgttgctgtgctctctctgaaatcctccactgcagccacaccaaatttctccctttttcttaaacatgtcagatatttcatgcccatgtcggatgaggctgggctaagtggttcccctaaaccaaagagcttctctctacttctgtcaaaatcctcgctgttaatccaagttcactctcctggtaagcctttcccatttttcctggttggtgctacctctctgcacttccacttcctccttggatcacggagtctttttttttttttttttttttttatgagacggagtttcgctcttgttgcccaggcttctggagtgcaatggcgcaatctcggcttatcgcaacctctgcctcctggattcaagcaattctcctgcctcagcctcctgagtagctggcattacaggcatgcgccaccacacccggctaattttgtatttttagtagagatgaggtttctccatgttggtcaggctggtctcaaacccttcacctcaggtgatccacccgccttggcctcccaaagtgctgggattacaggtatgagccaccacgcccagcctgatcacagagacttagttctgctttgtggttgtggtcataagctgcctctctcagtgggtccttagtgtttctcttggtcttggacactttggaatctccatagtactggtgcatatagccatatgcataatgcttaatgacttttacttgaattaaatctatcttagttcttatcctattcgagtcatttctcaggtcctgaaattctccacattgttttacagaagagaaaaatgaggtccagttataaaattaaatgacaggttccaaacacactgctacctggagacaagaggtgttcctacctagggcagaaggtcgcacctaaacataggcaaaggtgatgcctcggctggggcttatgctgtagtcccctccccttcctcctacacatgtgtggttggggtcaagaaaggaggaagacaggcctgctgaatctcataggaactcatgagcccctttctttgattcctggtgtgacagaagccataaagctttgctgagataccatggagtgtggaggagactagagagactactggggctcttcatggagttaaaaggttaggaccaaaacctgacagcctggacccagtgcactgacctgaactctaaaaaccatcatctacagctgcagcatcattgcctggccaaagtagtggaggtggagttcagtgtgagcagagactaggtcttcagtcttgttatcacttcactgcccagagatttgttaagtgtttcctctgtgagaacatctaggacagatgcccaaaggaggtcgtgagtgtaggtgagggcacaagaaggtgctagtccttcacgctgtgggtggcatgtggcacaggcatggaggcattggctcaggaaatgtagggtggagggggaatggttgggaatgacacccatggaacaaaggactgtgtgcttcatgctggggaatctgggtttttcccctgcaaactgtcctctattgcaacacctccggagtgggtctgggagagtggtgcgagtgctcaggagaaaaggaatgccctcatttcttctaccgagtggccatgttttgttttcaccattgtttgcttagaaatttatagggcagaggtgtggagatcaaatgctaaaaggatgtgggagtgttctgacttcatgtaattttactcttttcagatgaagcagtctatattaacaaaatataaaagaaactgaaacttaactttttatactcttgacagcaattttataaaaatactttcacatatatactatatataggtagtatatatagcatatatgtaagtatatattctatatatattatatattttattattttataaaaatatttttataaagtattttagtagttttattttttatactttttataaaatgctttgcatagtttcatttttttaacttttctttttgtttttttacttttattttttatacttttaaaaaatactttttataaagtatttaaagtattttataaaaatactttcacatatattatatataggtgatatatagtatacatataatatacattaaatatatatataccttttgtaagaccatgttttggctttgaaaaatagagaatacattttgtataaataatttgtaacccaagtattccatatttattatagaaaaatgagaaaatatagtttagtgaaaatgacaaatctaaaattccccatctcctttccctcagtgacaacagttcacgttttgctgtatctccctctgaatttctttctgtgcagatatttatatatctttgcaaaatacaatgatatcataataatattttgaaactttaaaatgcaatctactttgaacattttatcatatcaataaatatatttcaacagtgtaatttttagtctctaaatatcacaggaacattcctaaatgcattacaaaactgcttctcttttgctggacatttagggtgtttccaatgttttgctattataaacaacactacaaagaacatccttgacaataaatcattgcgcacatcctctattatttccttaggataaatttctagaaatggaatttttaagccagggaatctgcacatatttaaagacgtttgattgtattgttgtgttgtattgttgtattattgtgttgttcatcagaaaggctgtagtaatttatactcatattggcagaactccggaactccagaacagccttttaccaactcaaagtgagacttgtagagataagtacaatacaggttgaggactttgtctctggggtcttgcacctgattcccttaaaggaaaactgaatgggccaggataacccttgtcttgatgagcgaaaccaattaaggggcacaccaagggataatagagagattaaacttctcctttcaccattttaacacgaacctagtggctttcagacaatatgtttatgtgtcattttgagaatatccggttccaccatttagagaagaaagtctgttcccagaatgaacttatttctaggaagtacagttgttacattaaaaaaaaaatagtcctcccattttgttaaaagcaaagcaaaacaaaacaaaaaggtgggtttcgctaacatcaaaggatggaacttacagggaatgacttgggtaggatggggggtcttctctctgtgagggctgaacaaactatcctctgcacagaaccaaaggtaaagagaacttgccctaagacctcagtatgatccatttttgtagaaagaggaattctgacatgtcatgaaaaaagaaacattttatctctgaaagccaaattctcagccaatgacgaagagtcatctgaacttcagtgaactggataacattaaccttccatatctacattcagttttcacagactaacaacatgtttccaagtgtttggatgacaaataaatatgtacacttttctgtcatcactgccgttggagtttttgttgatattctctctgtagcaaaaccagagttccctttagttttcaggttctgcgcactgatgatttttttttttttttttttttgagatggagtctcgctctgtcgctcaggctggagtgcagtggcctgatcttggctcactgcaagctccacctcccgggttcatgccattttcctgcctcagcctcccaagtagctgagactacaggcacccgccaccatgcccgactaatttttttttgtatttttagtagagacaaggtttcactgtgttagccaggatggtctcgatctcctgacctcgtgatccacccgcctcggcctcccaaagtgctgggattacaggcgtgagccaccgcgcctggcctgtgcactgatttttaagtgagaatgtgggtgtttaaatattggtagacatccaatgctagctggtcaagttgaagatggatgtgccctgtaactcagaaatcccgtatctaggtactcagccaaggccagcgtgtccccaggtttcatgtgaaaatgtagattctggttcagcaggtctgggtggggcctgagactcagcatttctaattagctcccaggtgatgctgatgcttccgcggttggaggaccacgcttggaatagtgaggcccagggaagatgatctgaaccttggctgctcattagagtcacctgggggagctgttatcaactgtgatgcccaactgccctccagcctaattgaagcagactctcccaggggagaccaggcatcactagtttttcagtctccccagatgattccagaaaggaccccaggccctggaccaatgcggactcattcacgcgtatgcatggagatggacaggggacattcactaaataaattgagattattcacatgggggaggcctaagagctgcttaatgattgagtatatctttgtgaattcatttggctacatcttgaaattataacattgagtgccaatagcaaatcatatatcgtttatgttaactttaaaaacacaaaacaatatatgtagtttaaatggtaaaaatattaaaatatgtataggagtgatacacgtactaacttcaggatagtggttacttctaaccactagctactaacttcaggataggtgtttgcagtaggagaatggaatgggaaaggtagattctactggacctgcaataatttctttcttctatgtagctgaagggaagaaagggagggagaagcgaaggaaggaagagggaaggagggagaggaagagaactctgggtgtatgactggctggctgtttctcactattattacggtttacctctgcaaacctaaaaatgtattgcagcagcatactacatgctccattcttgagtagcctaaaatattagtgggaccaaacaaacaaggatctgaaagtattagctaaaatgtgactcccacacctgactttcattcaagaggactggaacatcctggcatgcctgacccctaagggcttgtcccgggaactgagatcagtgctcttagtttacaggtgggacagacacagaaaggagaaatagctgcccacagcaaggtccagaaagtggagaaatggtgagattagaactcagggctccaactccctgcccatgtgtctctcagggctcggggcccaagggagcagccgccccatttaccacactctgaagaccctaccactgagggtgtttaccacaggacatcccggctggcgtttctgttggagatcacctgctccttctcccccgggccctgctctccctgtcccataggtagcactggagtgtgacgacgtggcctgcatcctgtggggtgtttgtgctcgccatggccagctgtggaatgcaaaaaccactcaccaaccccactcctgcaggtgctggttaattgcaaaaccaaacaccctgcaggaaaagtctggaactgacagctctctatgaggaacgctggctcataggaggggctagagtcttggtgtatctatatttcatttccgattctgtggtcagtatttttcagtattttgcataaatactgttattattatttttgttgttgttgtgatctgtaattagcaccttcctgatatgtgtggcttactcttatttccatataaatatatataaatataccagtagttttctaaggaaaagaagtttcctcttattcttactcattttaaaataaataaataaaattgaacataaatgagaaaaaagaatttttaaaatcttatgcctacaggaaactttagattgagcaaaaacaagggcatgtgatgtgaataatcccaagattccagaactattcactttaaagacaatgatctatggatgtgaggcagcttttgtctttcccccaaaatgttctcctgggtagccagggaggctggctggaggctgtgcttgtggaaggcagctggtcagaaatcccacgtggatggggatctaccccaagatgaagatccctggcttcaggaattgactgaatgtgttcccacccctttcagatcctacgctatggagtacagaccatgtgcggcagtggctggagtgggcggtgaaagaatatggccttccagacgtcaacatcttgttattccagaacatcgatgggaaggaactgtgcaagatgaccaaggacgacttccagaggctcacccccagctacaacgccgacatccttctctcacatctccactacctcagagagagtaagctcccccttcctccaaggatagatggctgtggctatggttcttatgacctgagcttcagagggttcaaccaggtgtgtcgacagcatcctcctgccctcgcccagttcccactggggatccgagggagccacatgcttggtatgtgatgacttaggggagcaacaccctggccacatcacctgatgagaagtagtcagcgctctcaggagaagccaaaattcacttcaacactcagctgcctcctccagggtcctgcgaccaagaagatggaatgtcaaaggggaaaggaagcgttaactggtcacacattagttaagtctccatgataccccgaatcgaaatagaatcattaaggcttctctttcgtaggaattagggggattattctccctaaagctacatgaagccccactttatattctaacctgagcacagaacaagggaagttttcactttgtatcatgtgattcggcttaacctgacagaaagggatggcatgttggcatgaatccagaatgtttgctgcatgctttaatttctacaacgtccagcatggtgagaaggaagtagtgtgacagacagtgaggtggataaattctcctccattgctttgcctggcatcccaaccacttcttccctgaattaaagacgggcccccatgtaggttttaacatgctaacaagtagcaggttgctggaaatagttataagcttcccatgatgttagtgtgggagtgggggaacggttttctttctttctttttctttctttttttttttttttttttgtaagaaaggtaattctctttctctctctctcttttttttttcattttgatgtcgctttttgttttgttttgtagctcctcttccacatttgacttcagatgatgttgataaagccttacaaaactctccacggttaatgcatgctagaaacacaggtaatgctggccccgcccctgcctcccagcaagagcgtagggtcttacgtacaggttgcatgctttcatgggaaaccagtcagcgcgtgccaggaagacagaacgcaggtagatgattcagaatactttcggatacttaggaatgtaccacagcctaaaggaaggtgaagccctttggttttctgagcgcttcccaagcaccccactttgattatcaaagggttcctttttaaccaggagacgtgcagaatttgcctttagccataacttagctcacatttgccggattacagtcttcttctgttggtcccaatatattcgctgtgctgactctgtagacactaaaagcatgttcgatataaaagggcccttagcaacctcctttaattttttccatttttattcttaaagaaatatttgctaggataagttggaattttctttttcctttccaataaacttttaggctatttgatttgttttcctacagactttgtatgtttgcaaaaggcaggagggaatttctgtaacattttgagagcttttgttcagagggaacctctgctataattttggagaatatgaaattagtcactaaccaaatgcctgttttctatctctaaccgttgcctctacatttgacttagttatgtatttattttgcctgagcctaagtagggtttaacaccgtgcctcatcctggctaaccttcctccctcgccccccgctcacagcagaggctgggttttctgtggatgaatgtgttcctggttcacatccatctgctccttcctgatggagagagttccggaagcatggccaccggctgctcaccccactctgttagctgcagggaccctccacaatcactcgggctagggagggagacgggaagtgccagaaagccttgcaagtcagccagttaactcacgatcagccctcacatagaaatacgcaattttcccaatatttaccattttattttaaaatataaaatgtgagtgagtcccggtttgagtattacaatgaaattgctcatttatcatggtcttctatattcaacacattgtctttttaatctgaagttttaaaaaacctgcttcgagttggtagtacactttttcaataattttggttgcacacatcagcctattagtgaccttgtggccagaaataacagataacttagaggaagttacttccccttcttaggaaacacctttgagctatgcacattttctgataatttcacatttatttatgagttctttaaccattgagtgaaagtttcaaaaaagctccaaatatattaaattttgctattgttaaacacggaagaaaccaatgaacaagacaacaaattccaaatggactgaactatgaaaagggaattttctcagctaacagcatgagttttggtcaaaagagagagagggaaaatgcatttgaatagagatgtggattaattattaataaaatccatatactcttaggctaaatacttataattgcttgatactactttccaaaagctctgtaaaatatattatgggtttttatacaagttgaaaaataaaacatgtaccatataattttttaataaaacgagattgcccagtgggaagtgggattgagggggacacagatagggcttcatcaagaagttataaaatcaaaacacaaaacgctttatagcaaacggggcacaggagtacaccaaggctccaagtttcacttccatcttgagaatctgacaggtgcacctgtctgtttctccggagctctgttaaggcaggtttgaggaggtctcttccctttgttgtcatagggaaaagtagatttggcgctgatgttgagatcgacaaccacaacaaaagaccttcacatgtttgtctttccttttgtctgcagggggtgcagcttttattttcccaaatacttcagtatatcctgaagctacgcaaagaattacaactaggccaggtacgaaaacacccctgtgtgatctcttcattgagagacatcccagatgtcctgctgagatccgtgccctaagtcacgtgatacaaagagagctgatcccggagctgaagccagtcccagacagtcttattctgcctctgttgatttggagactaaatccactcaaaccatttcattcaaagaccacactaaaggaattaagagcagattagccctttaactagcttttcagaaagacagatgggcaaagaaggcatcctggatgcctggcagttaggaataggccgacttttgaactaacagaaggatctgtccctcctcgggggaagagcacaaaacaaggacactccccagattcacagtgaccgattatcagtatgtcacaagaagccagtcttgcagagcagaagcatgcaaccagtagtatttacatctgaatcttactgcctgtcctccaaatgatttaattaggtaataaatttacatgccattcatgcaaaaataaacatctatcaagtgcccattagtgccaagcgtggtgttagactctgggaatatatagatgaaccaggcttcagtaagcttcctgtcttcagaaagtttacttcttcattcagcttggtttgttcatttgctgagtgcctcctctgtgccagccacggatggtatgatggtgaacaaaccgaaatgttttgcctccagttctagatgtttcagtagagtgacctagagccagagagacacatatgtacacataaatgttttccctaatgtgatagattttatggtagaggaaccacttctagcaatacagggcgtaggagcaggggtggggaggaactcaatcccccatgaaaggcataaagatgctttccagaggaatggccacatggcaaaggggaattagatgtttgccagacgaataatgagcagggagagagggcatttcccagaagggtatagcttgcctttagcatttgtcctctccctgggacttacatcagcccgataagctaggtatcattgtaccagcctcacagctgatgacattgtgttcagggtggtgggatggtttctccatattcatacatgcttccagaattcatgttaaactctatcacatatccggaatacacaagtctcagttcgaactggttcaagatctaggcttggcaactactctttctttctaatgagaaagactgggggcccagggagctaaagagaatgaatgaggaagcttctcaggctgttcaaatactgacactgccctggttactgcctagtgacttcaggctggcaattttctcttctctaacgtcagagaaaaagtttactgtcttgctcctgggaagcatgatggaaaggcttagcagctaaggggtactaagaggtagtaagtcatctctgtcatgtaaaagatttcacaggccattgaaacatgggcaagacccagtgcctagagtctgcaagattggtcctaaagacatccaccacgtgtattgcgagtggaaaatagaaattcatgtttgactcaagctttagagattttgtaattctgtgagcatttaaaaaatatttccatataaactaaaaaaataaaaactatttccaaaacatttggctagggttttaaaaatttttttactttttaattttgtatttgtttgtttatgttaagacatctcataggtgcctctgactgagttgcaaagccaggggttgtgagctagtattataaactgtgttaaaagatcacaacactggccaaattcattggcacaatctctctgtcagacaagccagctgactgatgctacctggttaagacagtgggtcctggagctgctttgttttcacattttaggatatggtggatttggaaggtatggcccatccaggtggatggagaagagggtgactgtgaggatgttggttgggactccctctctgcccaacccagggaaggcaagggtggcaaactcagacacctcccatgccgctctgatggtggtcttccatgggcccataatttgagcgtgacctgggagagagcacacttccacagctccactactagtcaagtatgttttcgcgactcagtttgtacctgaaataacctgttttgaccactgctactgtgattatgagaaccaatacaaatattggtatctgacctgtaaagaatttaaagcagactgaacaagccagaggactatttactgtaggccctattcagggacttgaacttggagataagaactagttatacacctcgggtcatccattgctaagcgatcaaccttaaaggactgctcctgtggagataaaagctgtgaacctgcaactggagaatgaacgtcgtgatggctgagggggaagagcttttgcatcactaactttcagagctgaacgagctccagagggaggtcactgggaatctgacgatatccctgtggtcagtgggtacctgactactttcagaaaggtgattgttgactgtttctttgaaggtccttggggatacagacccaaatccctgtctcctccactcttggtttgctgtgccatgatcttcatttccataccctttgtctaatcccacatccgagggaaccgaactctggtcagcgttattgtgctgaccatgaagcaagccaggctcctaggtaacaactctacttagaccagaatctgtctcttctctgcatggtggccgtttcattatagagtccctgatagaggagacagtggtgttcagggtttactggttaaattagacagcattccgcaccctttctgcagagactcctacacatgtgtgttgtcctgctgcatccaccttcccagcacttcctcaccacccttccctccttcccttcccactgtgagtcacccatccctgggttactgccccaacctaccttttcttttcttttatcttcttttctcttcttttttttttttttttttttttgagatggagtctcactctgttgccaggctgaagtgcagtggtgcaatctcggctcaccacaacctctgcctcccgagttcaagtgattcttctgcctcagcctcccgagtagctggggctacaggcgcatgccatcatgcccagctaatttttgtatttttagtagagatagggtttcaccatattggtcaggatggtcttgatctcttgacctcgtgatccgcccacctctgcctcccaaagtgctgggattacaggcgtgaaccaccatgcccagcccccaatctaccttttcttctgttcatggcccaccttcccaagtggatcatttattccagagccccctgactgcttccctgtcaggtcagtctcgctgctgctgtgtcagttcagtctccctgcacaattggccgaggccgttcactgacctcacaggggaccacatgtgaacatgccctgccaccaccactacctgccatttgtccaaacctcatcccttttccttgcatgcccgtacctagtattttcccacgttttcctgattcaagatttaccttctttcacaacccctttgttgaattagcattgagacagtcttctctactctcataaagtatcaacccataggcatatcattttacattctgtggttttatgattttttaaatatatatatattttattatactttattttatgatgtttcacgtgtttctcacgttgttgcagttactacgaccagaatccctttctgtacctcctctacaaacacccttcttttttgctgaatccacttcttttggagccatagccctttgaggtctcaggggaaaaagtggcaaaaacagatccacagaatcttgcaagcccctattaactacacagtgcaccaccctgcctgtcctcttaggagcaggtcatgcaaaagctcagttctatcccaaggatgatgttctgcaaccccatcctttcctcttccatccccatgacaacccatatattatgatatgcctctggggtgttatcaaaagagattagagagttaagcctgcaaatgcagcctttgcttctactttgaagctgctgctcttcaggggtttcttggaatcttaaattattcctccattggagctcacagcctagtgcttttcagcacagctaggcatagtgagacaatacaactactgcatagcatctctcagttaggtgttatgtaaagcctgtatcttagcaaatggctaaaattgcattctttgcttccgcttagttcttatataaccacagggatatgcaaacctaggcaagaagggaatgcaaaatgtttccaaaactccatgctcaaactttgatgtagaattttaagaagatctggaggaaaatagagagcaacttaattatgttaaggttgactcaaactttttttttcatttcacagacacttctagattggttcttagcagcagctcttgctcttcctaatttgtgttccccattagcatctaatttcaagagcaggcaaatctcatctgttcccatccagcccagccagggaacctccagagttgctttgcagatatggtgtggatcctgcagaatgaggatgagctcttccacgatccacattcttgccctttaaaaaataaagcgggtaggcagcggggtggcggtgtggggtgtgtggggcaagagctagagcgttcctcctcagtgagtttgatgaagggagaatgtaaaacttggctgaacttagccctccaggaaagggtagccagaatgttgtattaatttagtgatgtcttcaaaagggtgtggtggaggaggagtctcattcagaatgagaagctgatcccagctcccaggaaatcgacacagttgctggtgtgtagtggtcagcactagccgagtccctatttgtagcttcatgctgttttttatactgttgtgatgtaatgtacatctgtgttcacccaagctgcctatgcaatgacttctataaagctcagtttttaaacacagtctcttacagataaaacaacagaaccagtgccagaaagcagccttcccttacatgggcacttctgccaagcatatgagttcattgccttgaagatcaaagtcaaagagaaatggagagggtgttgaaatgatcagcgaaaattaaatgtaaaatatattcttattggaagtctgatgctctattatcaataaaggacacatagcaaagatacatagaggagtgatttttcaagcagtcaagagcagaactacgaaggttttgagatggtgtagctgccaaagaagtcacccctggctgtcccccatctcagtgagcctgagttgaatgtttcccaatgtcatatcccacagggggatacttagtgcccacagcatgtgatcggtagccgataaggaagcattggaccagaatgtcatggaagaaaacaaaagcccacttatcttccgcggcaatatgtttatgaacatgtgaatcattgttcatataactgtctcaaatacttggctgaaaagtagactgtttggtgttaagtttcgacttattttcgagggaggatgggatatggttatacaccatatgaaggattttgtgaataaagagtttcaaaatattttgggaatagtagttcggcatttattttttttcccagtcacatttcatgagcaacaattttatgtttaaggtagtatctgactaacctactgatgctgtctattcattccattagcatacttatgccatgggtaaaagcaatccatctagaactctttcaaccattttttagtttgtctttgcacactctagatagcatttctgaaatcatctgcaggaacagagttcctgaaaagagcaatggtctagagcaggctttctcagacttcagtgtgcaccagagtcacccaggatcttgttaaaatgctgattctgaggccaggcgcggtggctcacgcctgtaatcccagcactttaggaggctgaggcgggcggatcacggggtcaggagagcgagaccatcctggctaacagcatgagaccctgtctctactaaaaatacgaaaaattagccaggcatggtggcaggcacctgtagtcccagctactcaggaggctgaggcaggagaatggtgtgaacctgggaggtggagcttgcagtgagccgagatcgcgccactgcactccagcctgggggacagagcgagactccacctccaaaaaaaaaaaaagataataaacaaaatgctgattttgatgcagtaggtctggggtaagattctgcatttctagcaagctaccaggtattgttgatgttgctggtccacagaccaccctttgagaaacagagatctagaacatatttctgtatttctgtattatcttgctttttttcatttggtaaatagaaggccttagttaatgtgcttttctgctcctaaattaggttagatgtggctaggattgccttgtgagtaggtttttctttctgagacaatttgcaaattgaaactctggctgtccagtttattttagacaaaatgcaactgactgagaacccatgtgcagagtgttcccagagacttaagttgaagttcagttgtaaattgttaggggctgcagatataattcctatgtgtaaccccaacacaagagatgtgaaaatctgaggatctgggtgggaaaagatttacgtccaaaaatgcaaaaatgccagctgagagagaggagtaacatcagtttaaaaagaaaaattatctaattctccaaagctctgaagggtaggatttcatagaccacactagtagcaaagatgcttgcagccaaacagaccaaatacattaaggagattctgtgttgactttcacgttgcgcatcatttctattctctttgggatatgaaaataggaagagacacatcttctgcaacacagtcaagctctttgaagattgacccatcaaattgctggttttaaacaaaattaaaatatttgtttaaagagaagcttaaaaacaattgcattgtcctaccctccaagtgaaattttgtacacatctcctggtgtctggcagcaaagtacctgctgagatatttggccatggccttcacttggcccagaatgacacatgacattgaactgagaccaagcaatccaagaagacataattttgaaacagttatgtaataagattgcatgtagaaatagccttagctatgcactcttagcaagagtattataataaggtttctgtaatatatttttgaaacaaacttgaaatgacatagagctttgataatcattaatagaactcacactgaggatgcagaagtatagttattaaatttgcatatgaaaagtaaatgaaggtttataggacaagtgatacgactttataaatacaaagaaatgtttggcatatgcttaagctcagaaggtcatcattaatgggctgtgggagcaatactatttcagtcctgtaattcatttcatgcaggtcattttagagaaattctaaatttatttagaacattagaaatgggagacatttgcctatgaaaatcactagatcagataagactgatttaatataaattgatgagattataaagggaaaatgggagttggctaagagaggcagctggcaaataaaaagataaggcagcgatcacttcccaggagatgcaagaagaaaaagaagctgaatgtcatttgattgatttaggaacagacctcaaacaaaaatgggctggttcatccaagttgtagactctgctttggatgagtcatgaagataataaagagacagatgtagatcagtcccagtggaagcaggatgaactagattgtaagaaacttttattggggtcttgacttatggttgtaggaaattagaagagttggaaagctctgggagaatctgccaatggaagttttcagacaaacgggtgagaattttagaccactataatatatgaaattttaatttgtaaataaaactcaaatctagtgggatatttctttggattaccagatttttttgcacaaagtttattctaataaatacaaaatcaaataaaaaaccaaagcatctcttataaaaattacatgattgatcttttagtcaatttatttgtctttacagatttaccatatgagccccccaggagatcagcctggaccggtcacggccaccccacgccccagtcgaaaggtacagtgttggctcccatgaccctgagtttcatgtcacaggcagtggatgactgttgatggagtatataataatttctgtggttaatctgtgattttgcaacatgtgatgggtttgttccattgacgacaagagtacaattgatctttcactgcagtgattctttctccatttgggtcatcaggactttcataacaaaaataaaggaatgatgtagtgtatgtcaaccttcacaaatgcatgtttcatgggatgtttgagtacacattaaataatcggtgttttcctgaatcttggccatgcttaaaagtatccctggctttactttatttgactggtggtttccctttatgtgtttatcttagactatgatttattgtaatctgtttggtaagccattccaaattcttttttttttttacttttggaaaaagtgggaggtatccattttttaaataattggaaatgtcctctttttttgttacagtgtttacatttgatttcatcagaaaggaaaatttttccttaccgtgagatgcttctgagttagactattatgttaataactaaattaactgatagaatgattatgcaacaacatcaaagactagtgaccaaatctgttatagctaattgccttttgtatttctggattttcagctgctcaaccatctccttccacagtgcccaaaactgaagaccagcgtcctcagttaggtatgtttcaggggccgtctggataaccataagagaagattcaggctcagcagcacatttctaaaatgcttcactttttaatggaaattaacatgattgtttgcctcttttcgacagctccatacataagatagggcccaagtcatcagcctactcatgcgaggtgacttgagatggtgctaaaacacgtccccaactatgcaataaatagggaaaaaaattctacgtgcacacaggctgcttctttgtgatccattaattttttagattttactttccatgcctaaacaacacagcctgcacggccctggattgatggggcttggcacatgtttgccctctttatatcattggttggtgtgagccttgagctatatgtcaggatcctggggttgaatccaagccctgccaccaattaggagtcccctagcaagacatctgagatgccgtgtgacatcttctctcatagaggaggtggaggcagttgatttggagttggaggacattttcggctctgaaatctgaaaaaacaattaagtcaggcattatgtctgaagtcacatcatactatgttacaactatgtctaggatttgactttgtttctttttgctgtagatccttatcagattcttggaccaacaagtagccgccttgcaaatccaggtgagaaactgctgatgattttcttcttacaaaattactttttggcagtggttattttgaaaagtaaattggtattggtgagaaattccttcaactgaacagattttagttttaggtctcactgaattatttgccttaatggaaagatgggttgggttataaattaagatttcagcttcagcaaagaacattataacctaatccaagctgtaatagttttctagggctgctgtaacaaagtaccacggattaggtggcttaaacaacaacagtttattgtctcgcagttctggaggctggaagtctgaaatcagagtgtcatggtggcaggtttcgttccttctcagggctgtgagggagggatctgtcctgggggctctccctggcttacagatagccatcatctcctcgtgtctcttctcatcatcatctctctgtgtgtgtcagtctctgtgtccaaatgcctcttttgcataaggacattggtcaggttggaatacctaccccataaccttactataacttgattacctcatttaggatcttatctccaaaaaaggtcacattcttagatactgcgggttaagatttcaacatagggaattgagggaacacaattcaacccattatacaagcagataaaataactagtattttttaaaagagagccttgatacaaccacaagacttcaaattcaggctcatcttcgatggtctgtttctgaacttcgatgctagaagaaagtgcagattcttaattagcccatttgtaaccagtgcattgccaaggtttgtcacctgtcctagtgtttcagtgccaaccacatagttttatttgtttgtattcagatcagaaccagctgtgctggcaccagcttcagaaattcatagcctatgctgcatattcccaactgcaaattcaaatgccaagatgttacaggcatattgcaagcacaagatggaatgtgtatttcctaaacgttgaggccaaaataaggttcgaaatggaataattaagatttaatcagtgtacatccctgcaagagaatctacacattgaaaacacgaaatgttatcattattgaacatctgtatttttgaagttaaattttggttaatgttaatgaattcaatgaattttttttacacagctgaaaatctaaagaaaactagttagcctggggcctagactaggtgctcaataattatttgttgcatacatgaatgccaaggataatgagatatagtcctttagctcagggtgcttttggtccgtggagagatggacacaggtagttacaacattgtcccaaacacagagccacaggccctttttgctcatgctggctttcatctagtagcccaggctcctgaggctgtggtctcttctcagccttctgctcagcttttcatttgcaactctgccatataaccattcaaataaaaataatgactatgttttgagatgattattatcagtcatgcttcaggaagactgatctggcagcaatgttcaggatagattagaaaaaagaaaatgacggaagctgaaacactctgggaatgttaatacaatcatgtgaaataacaatcaaacagctcccatcccgcagaatgccccccatagaatgtctgtggtcccttctgtgtctcataacagccctgggaggttactatctccatcctacagaaaaggaattagaagtccagagaagttaagtaacttttcctgtgtcacacagccaatgataagggaggtcaggttagaaacctgactctgtctgcaaagtctacttttgttttcttgccctactctgccactgactaagtatgaagggaagaggaggtcttacaaaatgcggactgtgagaatagaaagcaaggatttcctttcagggtcataactgcttaggtgcaggcgatgaatctgaggtcaggaaggaagaggaggaaagagtcaagctgcaccaaagaagaccaaactggcctttgcactcacacattggccaaatgaaacatatatgtccatgaccacgttgtcacagcccaaaggtactgcttggcttgtttgtagaatagggcctgagtcacttgctcctaagcaaagtgccagctttcacaagggaacactgcatatgccctgggcccagcagcccggggatgccctttgtagatagagggacctgagctcagagcaaggagaccggaaactcatcacaggcctggggaaggaggactgtgcttcataccattaagactgttcttaatgggcctggagaaaatggcaacatcccatctttgatttgcaggcaagtgactttaagataaagatttatttcatttagtttctgatgaatttgactttctctccatctatctttaggtttgtgtctgttgtgctcatgtgaacttttcccctgaaaccagaatgtcttttatctttgtattaatgacaatgcttcttcctgtttgattctatttttctattctctgataaataaatctttcatcacttaaaaattgctgtctttgctcttcatacaatacaaattccttttcatcattttaagtggaaagattgcatcatatagtatgaatgcacaggatgatgtcagcatcccaacatctctatcccaaatattcacttgatgtgtactttggacatcacttttcctgctgagaacagtgtgtccctgcattctgatatcatggatcggttataagcaacacagctcctttacatcccatcagagcagctgagaatctatctaacatggttcctctaatgaaagagctttggtgggttatgttcagaggcttccttgatgctaactggatactcttcaatggtgcacatgaaaatacatcctgcctcttgcagaacgacagaccaggctagggatgttttcccatttgttaggaggtggcagtgtgcagtcttccagtgggagtcccccagggaggggacaacatggaaaggacctgaggaggctacagaggtgtgcataaaccaggcctgaaagcaagtttgcgcagtgattaagcatggcagcctagagtctggatttcaacccttgccaacgctaagcaaaataagtcagtctacctctctaagctccaatttcgtcacttctccaatggactaatcacatgattcctgtggggattaaataaaccaatacatgtaaagcgtttagaatggtgcatggcacacagtaagctttcagaggatatcagtcagcccaagaatagcaccgtttcaagcttcttcatggttcaataggccaattgaacagtatttctctttctttaggcatttcctggctataggagaggagtgttatctttccttaaactctgattttcagcccaaagaaattctgacaagaccattcaagtactgagttcatccttaccatgatcttgcaagatagtactattaccatcacccccactttacagatgacgatactgaggcagagagagctgcgagagttgccaaacgtcccacaaagggcagaggcaggattcagctgaagcagtggcaactccaaagttggtgctccctaccaccatgctttcctgcccctccagtaagtggtgcctgagcctcactgagcctcggggcagagacttccattcaggacacacctgctggacacacctgctgccttgcagagggtccaggccatgcacacgggatcttctgcaccacccctggcttctagagaaagtggccccaaaccactgccacatggtactggtggggcccctcacggctgtatttactgcccttgttcatcagctgacggctgcagggctttgcaccaggatgctgtttccaccagacacagctgctgactcactctgcagctctctgctttgctctgtggtttgtaaaccgtttagtttttttttcccccttttttgctcagtctgtacccctttgctaccctgtttctctccctttcttttaacaatattaggagattactttcctctgtaaaattaaaggagtgcctctgtcttcttaaaagccacagccgctccctttcacccacagggttctctgtaggtggacaatgctgcttgccactgttttttacctccaaatatgttttattttggtaattaccctaagaaaaaattagttcctccttactgacatcgcaaggatgttattaagagagagtaaaaaaaaaaaatagatctgaagggtttacccaagaaaggtgagtcctaaggtagaggtggtgatgctactcaatgaaagctcttgtctttcaagaacttctctttgtaaatcctggtttggcccatgagtgacccaagccacttttaggctttcctaaaccctaagcattcttgtttggaaatctctattctatattctaaaatgcacctcgtcacacattaaatgttattgttttggaagtaaaataagaatttaaaaattgctcttaaaattttatgactgagaataattcctttaccactgacaattttttaacaaccattgttcatttttgagaattcttgcagtgagaaattttgttctacacactgcaaaatgcagcgaattttgttacaaatattaaatttaacaattaatgagtttgacatgatgttactctttctaccatttacttaaacattcattgattttgcatttccaggtttctttcaaggtttgaaagctgatgaattttgcttacagttctcttatttctatagaccctcccttgaaattctcacagtcctgagccctatgtctttatggctactgggtaaaatagtcaagtgagaaattagctcatccatcctttgggcatagagtttgctgccacaaatttaggtcccctgctttctaactcttcagaaataggagagacatgagatcacttttgtccactgattctgtcctacacacgtttataagagaaatgggtgagggacaaattgctaagaggcaatgccaaggtttgagtagattccaagtgtgatttcggcaggtctgtggagttgctttctctatgggagaaagttgacgctgaatatttattttcaaacaaccgtatgtgtttatattgaagcatctgttagactgttaaatcaaaaatccatgccttttcctattcccaggtcatatacggaattttttcaagttgtaattttttggttacaatatatatactaagaccatatggttttctcataccattctttgtattttctaaatgcatattaataaaatgttggaggcaacaaaacttgattgggaacagtttgtatatgtggttctgaaaaagcaaaggcttccacttcaatgagctacaagctgttaatacatttcaaatgtgttgctagactgaaaatgagcactttccagcatagattcagaaaaagctgacctttctcacagtgctattgtatggataaattcacaaaaatatccatgtccatgtagccaacatgcaaagcagagtttataagttgggtgatatgtacaggaggctagcgaggatttagaagaaaatgaacgtaaaattgatttttacagtatattacttccctgagtagatgtcagttaaagttactttaatcattttatcacatcgattgatattacttacactataataaaaggtaatcttttggtaataagtctaaggcagtgctgtaactggaatttgggaggaaagacccacctcccatctgttcttaagcttctgaaatatgttcagcacagcttagcttctcttggtacggatactgctgtcaatatttacatgctgctgtcttctagggagccataaactatcttcaagtattgtaacatagcagctagaatgatgtgcctagatttttctttgaatttcataaaacaaagctgtatctgtatgatttcaatgaaatcaagaaaattctgactttgtccacccagctaaatgtgatctctttgacaaaggaagagtctcattcagcttcccaaggggacttgcaatcactcattgttggggtttttcttctggaaatgctgcttaacacaattggcgttgcagcacacaggcaaggcactggtttccgttacgatgcgcttgcccaaatactggaactgggtgatctggtttgaaaaagagccagctttttttttttttttcctaaacttcctcattttgagtgggttaattctgttctaggaaaagttttcacagaattgctttctgagcgccagcaaaatgttatgttagaaataatggtgtttacttccattctcgatttttttccataaacttttagaagttcatttcctaaatctaacttttattatcttacttgacctagccaatataaatggcattaagtcattattgccatccacataacagtactttgtgcttcacaaaataggaaaaaaaaatatatagctctttcatcccctaaacaccaggttgatctggctgttcttttaaggacgtcagaaatggatggaagcagcctgaactttgccccatatgaattcgctgcattccatctaggtcttgaatctgttagatcatcgtcctaggtcgggttcccttgatgcagagcttggggtaagcctgcttgtgcaggtgactgattaacggcatgttctcaggagagagagaatgggaagtgctgcaggggcagcgctaaggaagtttctggcctcctccaagcctccttgcagctggacgctgtttcagcccaatcccacgggagccctgaagcctgaatagcgtcatggagttggtctttccttgaggcaagggggccggcccgtggtaccccgttcagtccacccagctgtgggatacctgggggtgggcgaggcggcggctctgttcaggcaagggcagttctctggagaagtgggtggccatggaacgagagcagtccgcacccctgcagctgagggatggacggacaggcctggtgaagggaatgtgggcggcacaccaatagcacctccttccgtcatcacagagagcctctttcccctggaacctgtgctcactggagttttccttcctctcctgacctcattaggcagtggccagatccagctttggcagttcctcctggagctcctgtcggacagctccaactccagctgcatcacctgggaaggcaccaacggggagttcaagatgacggatcccgacgaggtggcccggcgctggggagagcggaagagcaaacccaacatgaactacgataagctcagccgcgccctccgttactactatgacaagaacatcatgaccaaggtccatgggaagcgctacgcctacaagttcgacttccacgggatcgcccaggccctccagccccaccccccggagtcatctctgtacaagtacccctcagacctcccgtacatgggctcctatcacgcccacccacagaagatgaactttgtggcgccccaccctccagccctccccgtgacatcttccagtttttttgctgccccaaacccatactggaattcaccaactgggggtatataccccaacactaggctccccaccagccatatgccttctcatctgggcacttactactaaagacctggcggaggcttttcccatcagcgtgcattcaccagcccatcgccacaaactctatcggagaacatgaatcaaaagtgcctcaagaggaatgaaaaaagctttactggggctggggaaggaagccggggaagagatccaaagactcttgggagggagttactgaagtcttactacagaaatgaggaggatgctaaaaatgtcacgaatatggacatatcatctgtggactgaccttgtaaaagacagtgtatgtagaagcatgaagtcttaaggacaaagtgccaaagaaagtggtcttaagaaatgtataaactttagagtagagtttggaatcccactaatgcaaactgggatgaaactaaagcaatagaaacaacacagttttgacctaacataccgtttataatgccattttaaggaaaactacctgtatttaaaaatagaaacatatcaaaaacaagagaaaagacacgagagagactgtggcccatcaacagacgttgatatgcaactgcatggcatgtgctgttttggttgaaatcaaatacattccgtttgatggacagctgtcagctttctcaaactgtgaagatgacccaaagtttccaactcctttacagtattaccgggactatgaactaaaaggtgggactgaggatgtgtatagagtgagcgtgtgattgtagacagaggggtgaagaaggaggaggaagaggcagagaaggaggagaccagggctgggaaagaaacttctcaagcaatgaagactggactcaggacatttggggactgtgtacaatgagttatggagactcgagggttcatgcagtcagtgttataccaaacccagtgttaggagaaaggacacagcgtaatggagaaaggggaagtagtagaattcagaaacaaaaatgcgcatctctttctttgtttgtcaaatgaaaattttaactggaattgtctgatatttaagagaaacattcaggacctcatcattatgtgggggctttgttctccacagggtcaggtaagagatggccttcttggctgccacaatcagaaatcacgcaggcattttgggtaggcggcctccagttttcctttgagtcgcgaacgctgtgcgtttgtcagaatgaagtatacaagtcaatgtttttccccctttttatataataattatataacttatgcatttatacactacgagttgatctcggccagccaaagacacacgacaaaagagacaatcgatataatgtggccttgaattttaactctgtatgcttaatgtttacaatatgaagttattagttcttagaatgcagaatgtatgtaataaaataagcttggcctagcatggcaaatcagatttatacaggagtctgcatttgcactttttttagtgactaaagttgcttaatgaaaacatgtgctgaatgttgtggattttgtgttataatttactttgtccaggaacttgtgcaagggagagccaaggaaataggatgtttggcacccaaatggcgtcagcctctccaggtccttcttgcctcccctcctgtcttttatttctagccccttttggaacagaaggaccccgggtttcacattggagcctccatatttatgcctggaatggaaagaggcctatgaagctggggttgtcattgagaaattctagttcagcacctggtcacaaatcacccttaattcctgctatgattaaaatacatttgttgaacagtgaacaagctaccactcgtaaggcaaactgtattattactggcaaataaagcgtcatggatagctgcaatttctcactttacagaaacaagggataacgtctagatttgctgcggggtttctctttcaggagctctcactaggtagacagctttagtcctgctacatcagagttacctgggcactgtggcttgggattcactagccctgagcctgatgttgctggctatcccttgaagacaatgtttatttccataatctagagtcagtttccctgggcatcttttctttgaatcacaaatgctgccaaccttggtccaggtgaaggcaactcaaaaggtgaaaatacaaggtgaccgtgcgaaggcgctagccgaaacatcttagctgaataggtttctgaactggcccttttcatagctgtttcagggcctgtttttttcacgttgcagtccttttgctatgattatgtgaagttgccaaacctctgtgctgtggatgttttggcagtgggctttgaagtcggcaggacacgattaccaatgctcctgacaccccgtgtcatttggattagacggagcccaaccatccatcattttgcagcagcctgggaaggcccacaaagtgcccgtatctccttagggaaaataaataaatacaatcatgaaagctggcagttaggctgacccaaactgtgctaatggaaaagatcagtcatttttattttggaatgcaaagtcaagacacacctacattcttcatagaaatacacatttacttggataatcactcagttctctcttcaagactgtctcatgagcaagatcataaaaacaagacatgattatcatattcaattttaacagatgttttccattagatccctcaaccctccacccccagtccaggttattagcaagtcttatgagcaactgggataattttggataacatgataatactgagttccttcaaatacataattcttaaattgtttcaaaatggcattaactctctgttactgttgtaatctaattccaaagccccctccaggtcatattcataattgcatgaaccttttctctctgtttgtccctgtctcttggcttgccctgatgtatactcagactcctgtacaatcttactcctgctggcaagagatttgtcttcttttcttgtcttcaattggctttcgggccttgtatgtggtaaaatcaccaaatcacagtcaagactgtgtttttgttcctagtttgatgcccttatgtcccggaggggttcacaaagtgctttgtcaggactgctgcagttagaaggctcactgcttctcctaagccttctgcacagatgtggcacctgcaacccaggagcaggagccggaggagctgccctctgacagcaggtgcagcagagatggctacagctcaggagctgggaaggtgatggggcacagggaaagcacagatgttctgcagcgccccaaagtgacccattgcctggagaaagagaagaaaatattttttaaaaagctagtttatttagcttctcattaattcattcaaataaagtcgtgaggtgactaattagagaataaaaattactttggactactcaaaaatacaccaaa

SEQ ID NO: 8 - DNA, 128798 bp, Homo sapiens
agttggaaagagaccacagactttgagggaagctcactcaggatctgctctccggcaaagtagtaagtgaggtgtgtgtcagtttctgcctaaaacttttcagtccattttccttttcctgctttaaaaaaatttctgtggaattaaagagtaagtcggtagggagattcaggatacaagtgagttttctctttctcttttcacgtctttctatattcccatttaattgtttaacaattttcaaaaatacttcctaacctcgtcagaatagtctgaaagcaagactatgtttttaaaaatgttccctgcttcacaaaagtaaaaccatgcacgttttagatacccgtagattacttgtcagaaaccctgattttttttttttttttttgcaaattggagcacttccaaagaaataaagctgtagttaaatatataaatttctttttattctctttcactcctagtaaatctattgttttacttttttctcctgctagtagtttaatgaattgcttttaatagagaggaaattgctacaggtttgaatcttgctagccaaactagcctgtttggtgtttttctctgtcttgggactgacctgcagttgtccaaagatctacaagttcctaagtctgttgttgagacatggtgtgggtgtgggccgcggttgtctcagagttagggaggtatttcttgtccccacggtagagctggactcagtggcaggagatgtcgatggcaattcctctgcatccggtgattttatctggccgtgacactttgtatgtgactcctcacccaccgttaaaggtctctgttaccaacttttaaagtagtattttcttcaggcaaacttaaaagggtgctgggtcactgaaatcaatgcattctattgcaggatttctttatcaccttttgggtaagtttttgtttttaatctcaagtccattttccttcttactttagaccactgccatgcaactgagaaaaaagtatttgttaaacagcaggaaataccaattctaaaatgataactccatcagctccatttgatttgtaaaattactgatactataactctttcatcagttgtggttttgggtttggtggcctatttttatccaaagagaaaacgctttttcttcaggggccgtgggctgtgcacaagggctgcagggtggccactgctgctgttgagagtcttgctcacctgttgttcctgaatggagggaagggagagctaatgggttaatgtctgcaaagtgctttgaagatgaaaaggtcttttcatgtgttcagtagtgcagttattaatattaatatttgaagaagcatgctgcttctaattgtaaatcaactacttccatccttgccaactcaatagtgaaataacaaacagttcaggcatccatgcagcctcttccgtcctggttccgctgctgaggatgtgggaagccaagccgagagcctaattatggagggggcatctttgcccggcaggctccttacacggaggtgctagttgctggctgtgaaaggatgtcctgaggcagagcctgggggaagctggtagaggggtgggatcctttggcatctggcagtctgtggccagagcaccgacttgggccagtggccggtcccggacgataatggagttcaaaggcaagtggggtcagaacttgaaccagcgctgggtcggagaagggaaagtggctgtgcacttggattatgtcagtgattagctttgtaacagagaacagggattgaacgtgtctgtgccttcttcccttcatctctaaaaggtgagcaatcatttgcgccccgcctggtttacaaatatgagagaatagaagtaaacagcatagggctatgaaaaatcagagtgccagtgaggtcaaggactgtctgaagtaatacttcaacaaactgggtgtgtgggtgcaggtcctctcacctaggggagggtgaggcagaaggcaaaacactgcaaacaaataatcaacagatttctctctttgattgcactggtgaatttcttactgataactgaggttctgatgtaccttgtgattttaattattggtgaatagatctgttttccatagtgactatcattttctaattaccagttcaaaattcccaactgttcacatcaaacagcagaagggaatgattacgtcccacgagctgggacccttccttccttccttgcttccttccttccttgcttccttccttccttcttccctcccttccctccctttctatctttcttttcttttccttctttctttcctccctccctcctttctttttctttctttctttctttctttctttctttctttctttctttctttctttccttccttctttctttctttctttctctttctttctttctttctttctttctttcttttctttctttcttctttctttccttccttccttcctttctttctttcctttctttctttctctttctttctttctttctttctttctttctttctttctttcttttctttctttcttctttctttcctttctttccttccttccttcctttctttctttctttctttctttctttctttctttctttctttctttcttttctcttttttcttcctctttctttcttttctctcccctcctttcttcttcttctctctctccctcttccctcctccttccctttcctccctttctttcttcattatggaaatgataaagtatttagcatttgagcaaaattaatgtggtatgcagcaatttagtggcatttcaggcaaatcttttaagtttcttcaatcctgggaaaaattagatgtgaagacataacttactttttgcttcctcatctcctttatccctgctgtactgaaagtatagcttattgaactccaccttttaatgtagatgattttctagttatcatatccattcttcttcatttcacctaaggaggaatactcagccctaacgtttactgagcacttggtatgttccaacatccttgctaggtgctttgcagggactgcttcatttaatctacaatgaagttttgaggtgggcactccactctcgtcatccccatttaccaggtggggactctgaggctcagtcatatgaccgtgttaactcatggtggaccctgattagagccaatggaatgtgaacccagagcttgtgattggaactgcatgtcataggaatctaagtaactctaagacatttacacaaatttaggatagatttttctgcttagactgatttgcttatctaggagaacactggattaagcctgttttctgaagtggtatctgtggattacttattcattgttatgaagatactgactttgaagaaagactacccaggcctagtttcctgggtaagtaagtcagtcccttccctgacaaatatcagttttatttctactccatgcccagccttgtgctggagaccataccaaacacagaagaaacaatatgtaaactccatttttaaaattaacacaataatctttactagaaaagaggataaaaatgaaagacaatataattattaagtagtgtagtataacctatacatgctttgggagttcaggtagaaaaaaatggtatctagagcagtgagggaaggatgtttctgatctgcctttttttcaaaagaggatagatttcatattccagtaatcaagtgttggagctgccttcagaacttagagggaacaggctgggtagtacttactagcatgagagtaagcaacaaacatttagtgcaaatgtcaggaaaatattctcaatggggaggaaaaaatatataaattttcaagagatgtggaaaggtagaaaactccagaattttggtctttttagagatttaaaagagatttagtctttttagagacttaaaaaaaacttttcactttgaaataattccagatgcataaaagtttgcaaaacaatgtacaaaaagtttccaaaacatgtgagtcttttacaattgtaaaaaaaaacatataatgcaaataactcttttaaattatctcttggcacctcttgtaatccttaatccaaatgacttctgttgatgggagaaagcaccattgccagtttcttgataaaagggaccaaataactagaaccatgtcttcttaggaaaagcaagaagtcttggcagatgtgcatctggcatatggctcctgagacactgacaggtcctgagctactcaattctccccagccgggtttgtattgcacctgaggttaccagcatctgctcagccttggcacagaagtcttgcctgttcctccttgggctctgcctcctaaacacctaccttgttataatcactcatgagttcaaccaagttagtccagcgctgccttgctactcacagtgaagtcctctgacctgcggcatcagcaccacgtgggagcttgttagaaatgtggaatgtctggccagacctcagacctactgcagcagactgcattgtaacaggatccccgggtgattcatatgcacattacagtttgggaggcactgctctaaagaaaaagcaaaaacaaatgaaaaagcaaaaatgaaaaaaatgaacaaacaagaaatcttgcactattttccgcagtgctttactacttccttatatttgtatctagttgctaaagcgtaagtccacaaaagatcgacattatatcaaaaagatgttggtttaactcaggaagctgcaatatttcaccatttgtgctatgcaatctttcaatgagttagttctccactgtaagaaaaatgcttacttcttggttttatgcataacaatggtacaaacagactaccattaaacagaaattgtggctcttttctcctgcaaaattcttgactaatgctactcaacctatgattatgaaagggaatcctgttttcatgacttgaatacaagtctttagaaaaagagatgagagatttagctatccatgttctagctctaacacttaaataacctctgccatgttgggcagtagaaaaaagtaattaatataaaacagtagtgttactaattagtgacattagtaagcatttactaatgcttactaattgccaggcactactgataaaatagcaataataacaattattatttattgaccatttttactatttatacagcatgctgctaagtatttgtgttttgtatgatcctcctctataatcctgaaagtgttgatattattacctgcattttatagttgaggaaactgattgtgaggttaagaaatttgctcatggccatacacgcagcaagcagttctacgttcacccatagtatgtaactccagggttcttgatcactgctaaacacgtaacctcttaggactcagttcattgaaataaatgagaagattgatgaattttttccaactccaaaattcactggaattgcacaatccctctttatataagaatgctagcaagctgtttagcattatactgagaaattggaaccttacatttcgggtaataaaacaaatgaaactccaccatgaaaatcacaatcagacatagtccaagaagttgcttgctggatttgagagatctaaggcagctggtatcttttagttcaattttaaaggggcattattgcaactatccagtcccctctcattgttcttgtaatatctctttctatttatggtgcctctcagttttgttgagaattcctttagagccagagccaagtctaaactctagattatgtctgacatgcttcacaggctaagagtctgtaatgtaattctttaaaatgctagtctcttcagaggtttcattggcagcattcattggattagagttgacgtttttaatctcgtggcccttctttgcatttgacttggaaaacaatctcttattccatggcctctattacgaccattcttggaaagcaaagagtactctacattattcctccagcttattctttttttgttttgaggttcgaagtaaaacacaatccttatttatttattcagttatttatgagtacttaccatgcttctggctcaggagtacatcctaaggccaagtgtgatcatttgttgaatttcatggtaaaatacaggatttgaggcatagcatttgtacacaggctatggccacttttatggtaaggcagtgtattgaatattacctttgatcttcaggaagatgttctgacagaagtatgattgactagaaagtgtagattgttagtatttcaaaggtttcagagactagaattggcattttcttagttagattcctagacctaagagtcggcaggttttaatgtatttccttgatgcctaggagaagcaagacctttctgtccattgttgacaatgccatttcagtactgtatggtgagggatttgtttccactgagaaggaaatgcataaaataatctatgaagcattccttatttcttaactgctatggtataccagagtaaaacatcttctagtctttctctttttcaggagatagtagcgagttactcctcaaggaagggtaaaacaatatactctttaaaattataatgacatgagttcattttaatattctaagaaggattcgttgagctatgtcaattcatacaggacttgaaagtgttatgcttaattaggagatgggtttatttttagagaaataggagatggatatgactcatttccatttaagcaagggttggcggaataattatagtgaagttgtgaagaaacaaagactgagatgttaattgtactgtgagttgctgctctgtaaccttagtgaaagaataaatgcacttagcttaagacacagaagacagtagcccataatttggaacacagccttcatttgtcagtgctggctacttaaaataagaaggaatattcactactactgtaatgttggattacttagtcaagcaaatgaggttcttgtagatttagtagtgagacagaaaaaccatcttcagttcttctaatcctttttcttttctatgcgttgtaaccacaaagtttccatggggagtaaggaatgttcagctttcctagatatgatggatcttaaacctgagttcttagagaattggatttgggagcttttgttacagtgacaggtcagggaagacatctactcaaatgatttgggaaatacacgtgggctactcatgagaatcagaaagaacacactgaaggagtatagatgaactcatcaatctggtacatcctatagtttagagaaaagtgccatcttgcttgtagttaactcttgagaagcctaacctcagggtcacacaaggacacacttcatcacagggattttttttttttttttttttttttttaatgtccaaacgataacttactctcttggataagctcaggacgcacaaggattgtacacaccaactctgtttcaagtactttaggtactttccctcatttagtaaacagacacttgttgcatggctactatgtgtcatctgaaaagacaccatccttactctcaagttactcatcattcaggagcagaaacaggcatagatacaggaagtgtcatgaactttgttacaccgttacagtaaatcccatggaggggcatcaaggaggtccatgcaattgccaaagagggtaggggggaggggaaagcttcctgaaagaggagatactctgagtcttcaaaaatacatttctatagtattcagaaaaaagaaattaaaactctatacattgtagattaaagatgttgccttggtagcccaggtgttgcctttagtttggcaaaagtgctgttgtttggagcaagttttttttacatggttagttgttttggacaccaaattcttttttttttttttttttcaatggagttttgctcttgttgccgggtgggagtgtaatggcgagatctcggctcactgcaacctctgcctcccaggctcaagcgattcttctgcctcagcctcccaagtagctgggattacaggcatgtaccaccacacctggctaattttgtatttttagtagagatggaatttcactatgtttgtcaggctgctcttgaactcctgaccttgggtggtccgcctgcctcggcctctcaaattgctggaattacaggcgtgagccaccgagcccagccctggaagccaaattctttgtctcctgtattccaagccaaaaggacatgctttttgtttgaattgataggaatcctaaattattgacattaggataaatgctcattggaaatctattcaaattttgcattgttttcaaagaggaaaggctggggtgaggggtggtggggagaaatctacattttctgccacagctttattgtgcttttgaattccccatgtgccatcttcatacccaggatatgttttaaccataattcattgcctatgaagctaacatgaagacgagagggcaagttgaaatttaaaacatgatgcctttgtcagtgggagtctaattttggctggtctattatagaatgcagttagtcaatatgtattcaaatatggaatgcatattttctttgtccccaaaatgctctttttcggcatttagtgggaatgtaaaatattttaggaatttttataatgacaaagaattggggacaaattaattatacgataataagaggctctttaaaagtatgatatatacatacaatagaatacttggcagtcatcatctttaggatagacagccacatttatcaacagagaaaaatgtccatagcattatgttaaatgtcagtgaacaaagcaggttacaaaagaacatgtggagaataatctcatgaaggtaaaattgtaatcacgtgtgtgtgtgtgacatctatgttcgtttagatagattaaaaaatacccagaagaatattgaacaaattattagtataattatctctacatggtgaggtttcaggtgattctaatatccatctgttacttttttgtattttaatttttgcggtaacattgtattagtttggcaaaaactgctgatttcaaaagaattttgttttcaaaagaaaaaaattaaagtgtaatttacttggtatttacctaaaagcgtagtttttcttttaggaatacataaccccaaatgaaaaaggcttaactgatgtcaaagttatctagaaatacagccaagcagggtcagagttgatgtgaactggattcagccttgattcaagcctggtctctttgggatttcttgttcttctgctgccttggcctgaacagtccctctcctccctaatttttcctttattctgtgtctctcaacctgccctgccctgccctggcaagctttgggtgaaaggaagtgagagcctacaggtcctggccgggttgccagtttggggagggtgggaagttggagaagtggtcactcgctctatgaagaatagaactctctagaatcaagcagaaccatagttttaaagtgattttttggacatgagacacccacataagccaaagtgttgacttttttgtcttctccatctcatgcttgtttctgtcctcgccatccagggtgatgagggtgcttagagaagcatcttctctctctctctcttttttttttttttggctttttggcagaagagaattccctcccacgtgacaactgcttgaacatcagctgcaccaatttttttcttagcattgcacacgtttattgcataaatgcaaagcaactgtggcatctgaagatttactccccagctaagcagcatccatgagacctgtttgggtgcaaaaatgatttggacgctgggtaacaaaggtctagagaagcatcttctctaagcacaggaggaggctgaagaccaggagtctggtctcagcttggccaattagcagcatcgccttagtctttctcctcatttgtaaaaagaggggtttacactgaaaaagtgtgtacaagttttctaacttacactattgtatttaacagttatctatgtgccagctactttccaatactggcctaggatccagggatctggagtgaataaatgaactaaatctcccccttggggagcttaaattctaacagagtggactttggagaagacaacgaacaaacacctaggtgtcagagtacggagaaaggcgctgctattcatatgcggtgatgggaaaagccttcttagatgagggggcattaaatagctatgtgaatagaaggaaacggttttcccttagaaatggatcatgaaacaaactgattatttcaagtggttctttatctagacctgcaatctattcagattctctattttgaggaacaaatatattcacatctgatctacctcttacatttttagtcttgtgagaccaattcattcatttactcattcactgatttaaaaaaacaatgagtttccattatgccccatggtctgtcttaagtgctgaagacaaaaatgaaaaaggcatggtgcctgccttcaagtagatgagaatttagctggagagacaaacagaagcagatggtaataaaacaatgtgataagcaccgtgatagaaatacactttgggaacataaacaaggagccgctaaccctggctggggtgaagcgtggctcaggaaggattccaggctgcaataacctctgagctgagcctaaaaccctgaggaggcagggttcactcatcttgagggtggatgggcattcctagcagagggggtaacatgagaagggcaggggagtgagacctggcaacgcgtgcctaagaaaacaacagagttccatgttgcagtggagggtgcaggggtcacggcgagagggggctggagaggtgggagggagcatgggggggcacagcaagccacagtccagagcagggcagcctcctttctgacccacttatcctgcggctcaggtggcgcaggtccttttcaagaaaaataaactcagctctgcaagaccctctgttacccagcgtccaaatcatttttgcacccaaacaggtctcatggatgcttcttcgctggggagtaaatcttcagatgccacaattgcttgtatttatgcaataaacgtgtgcaatgctaagaaaaaagttggtgcagctgatgttcaagcagttgtcttgtgggagggaattctcttttgccaaaaagccaaaaaagaaaagaaaaaacaaacgctactaaaaaaactacctaaacacttcatttacttcttctgagaaggtttacgtctctagcagctgttctgtgtcacaatctacaagtggaaaaagggcgggttctttttttctttctccaaaaaaataataaagcagcaatccatttctgtccaagagttatttcctgagacgagagcccttgagagccctggcaactccctcttgtcagtttcctctctgggcaaagggcttttccccaagggaagtgtcattcatacagtcatagcttcaagaatacagtccagcacagagtgcaccagatgttgggccagagctttcttctctcactctgtcaatgagaagagaaaacatatttccactgaccccttttccaggagtgttgctatgagggggagtgttgtctggccagcagacagaaacccttggtatctttgaggtgggcttcaggatgtggctgccaattccaaaagtcctttctcttagaaatacgtaagtaaaataggcatttgaaaggtgaaggtcctttgccacttgtgggactctagggatgatttatagggccatgtggttacaccttgctctatgcaatctttcacaatttcctattccctgcacccagcagaactgactgcttcctatttctttttccatattgttggccaactacttatcacattatgctatagttatgtgtgagcctgtcgattccactgcctgaagatagagatcctgtctttctcagatttttcctgagtctgatagaatctaagggccgtgaggtcaggaatccttgtttactggtgtgtttcaagtgcccaggaccgtgtctggcacatagtggtgcatagtgattatttaccaaatgaataaacaagccactaacaaaggacgcctattacatgattgttggataaatacaatcgtactcccttaactgtggttttgccttccgaggtttcagttactctccgtcaaccaaggtctgaaaataggtgagtacagtacagtaagatattttgagagagagagagagagagaaaccacattcaataacttttatcacagtatattgttataattgttctagtcatgtattagttattgttgttaatctcttactgcgtctaatgtataagttaaactttatcataggtgtgtatgtataggaaaacacatagtatgtatggggttctgtactatctgaggtttcaggcctccactggagggttttggaacaaatcctatttgggtaaggggagactactgtaactgaggtctgtgaggactcaggagatccttggggctttttttggaggaaatcagagggttgaatgtttacatgaaacagcattcccacatcactggggggaattccaaaaagtattcatttctagaaggtattagttgccctgcaggaccctggagggatgatcaacatttccctagggaatttgattgtggttaagccattatcatatgacacaatcaatgttgttaacttttatgtctcaaccaaagatctcaaagtagatcaaaaactttgaagtgggatatatggtttgatgatgattcatcaggactttaaaacttgattctaagagtaaaaacgaggaacactttggtgggaaaggagccatggagctcagtgagatgatcctcacagtgtatggtcaggacaggcatatctaaaccacgtgacatgcatcttactcttatttcatgctcagtgcctggtacagagtcagacccatcataggtactcactgttcttggaaacaaacactgagtagtgacccctgacgcagatgttaacaatgtccctggcctagggtactttgagcttttcctaccattcatcttcaccaatgaggagctcttcctggggtggttttgctgtagtggagatcaatttcctaaaaaactaaaggacaaaatcttgattaacatagtctagctattcagacccttagttaattttttaaaactaatgttattttgactgcattctacatctggaagaaaagacataagaaaaaggcaaagttttagttaaaaacacaaagtatagttctaggataagttatgacttcaggaggtttgtagcttacatcccttaaccatatgatattagtagctttgttgttgtagcccttaggcagtatagttttatattgccaagcctgtttaactatatcatttaaacatttaaatacatttcatatgaaaaaagggatcaagatggtgaaccaaactgcaaattgaacataagacatttcttattacttgatttttcttgaaatgtatcagttgctttaaatgtagaattaaggaaaagggcagacaaatacaaactggaaagcagtgaagttaaagcgtcacttcctaacaataagaatttggcctctgattggtatgcctaggaatttaatcttcgagattattcaagaacgactttttaaatgcatagtattaagtttatgaaagtgtgtaatgaactttcgaaagtatttaggtcaacagagatgttcgatatgtaatgatgaccagtagctaactggaaaatcccttcagccagaaaattgctcaagcattctagacactcagacttccaatgtagaaaatagctctcaacaagttatttaatagcccttctccttttttcaagatcaataatgctcaatcccttttgcagggtttctctctgtttatctgtttcttgggttactgggtgacatacctcttcaggagagctttttccatccttcctttctccaatcctttctatgtttattcctttatcaattaatttacaccccaactgtgtattgtatgcctacttatctgccaggcctggttgtgggtgggggagacacacaagaactggttcctgctcagaaaccctacaaaaatgtgcctcttgtgcactggtttactgcttgctgtctgcagtgtgtagacatggtctgttatccatgttaccttgcaaccagggaactggttctgtctgaggtctgctcttaccggtgctgggggttagtcactgatctttctgaatttccattgctttccctgccatgcaaagaagtgaactggttggctcctaaggagacttttagttctaaggttcgtgtcttccttgtgtattctaatccacaaacctgtgagcatccagaggctcagccaacgccttctctcacacaggtgctgagagcagaatgagctactttgtggattctgctgggagcagccccgtcccttactcagcgcctcgtcctgcagtggtggtgagtggtggccccttccctgcccctttgcccacacaatcttctcccctcctccttgtgcttcctgtatcctgacccccagtagacagagaagccaggaacctgaactccaaggttcgaatcagctttgaatcttttggaggatgtcaattgtaagattatctatgattttatcagcatataaaagaaaaccaaatactgatggatttgctgaagaagttttagtatgtttgagtttgagagaaatgactcaaatatgatgaacagttaaagccagttgattttcactgcccagttcatttgatgattttttacatattgaggtaccttattcctatacatattataattgaacttacttttggcctcagacataaaaagccaataatgcaagttttctaatcacagactttaaaagtgaaaatggaatatgacaataagtttatggaaaaatttcataaatcctagaataagaggggacaaagaaactttaaaataggactggatgaagttttttgtccataggtgagaagatccttgcccaagctatatgctgatcaatagaaatgctttgacaaatttctcaaaaatgtattgcgtgaggatcttataatgttgatattgatcagttccagtattaaaagacactaatatcagcagctgtgtcattaattattctttctaaattctgttacgtttttattcaaagatagccatcataaatgttgaattttttttttcttacagtgaaatacggacagataagtttattttatttatttttttctttttcttttttttttttctgtcactcaggctggagtgcagtggcacaatcttggctcactccaacctctatcttctgggttcaagcaattctcctgccttagcctcccaagtagctgggattacagacctgcaccaccacgcctggctaatttttgtatttttagtagagaaggggtttcaccatgttggccaggctggtctcgaactcatgacctcaagtgatctttctttgagatggtctcgctctgttgcccaggctggagtgcagtggtttgatctctgctcactgcaacctgtgcctcccgtgttcaagcgattctcctgcctcagcctcccgagtggctgggattacaggtgcccaccaccacgcccaactaattttttgtatttttagtagagacagagtttcaccatgttggccaggctggtctcaaactcctgacctcgggtgatccatccacctctgcctcccaaagtgctgggattacaggcgtgaagcactgagcccagtcgcaaataagtttattatattattattattattaacttttcccagtacatttatggatctgaattaacaccaataaacaagaacgcatttctgacttgtctttgactgtcttgccagagattctgtatagtttttaacactgattaaagttaagtatgacacagttaactgtgacctctcactgtaattgtatattaaaagacctgaattgtttgaagttttttttttttttttttttttttttttttttttttttttttgacggagtcttgctctgtcgcccaggctggacggagtctcgctctgtcgcccaggctggacggagtctcgctctgtcgcccaggctggacggagtctcgctctgtcacccaggctggagtgctgtggtgcgatcttagctccctgcaagctcagcctcccgggttcacgccattctcctgcctcagcctctcagagtagctgggactacaggcgcccgccaccacgcctggctaattttttatatttttagtagagacagggtttcaccgtggtctcgatctcctgacctcgtgatccgcccgcctcggcctcccaaagtgctgggattacaagcgtgagccaccgcgcccagcctgaagttctttttttagcattaaaaaaaaccaaaaactctcagtagctattctgttcaagggaaaagacacattttaaggatgattgagacatctctcttcagtagctgtttttaccacatttttcttctttttaaaatggcttctgtgttcatgtaagcaccgtttacttttacaaaaaattagaatcagaaaaaggtttagacgataatatatatcagaaatatgtttaaactgcccactccccaacactccactacacgacaagtccaggcaaggagtcactcgagtttgcttagtagcgattgccaaaggacttgcagtttaagatcatatcgagggctgaagaagttgccagaaaagggctcctcctccttttcctcacatagaggtcattatttaaagttaacacaaatgacattaaaatttccttaaagacgatattgtagaaatttgttaaaataaataatgatattgtgatttcagagcaaaatgtgtcattgacttgaaaaataagatttaaaagccagtccatgttaattctatttacaggtactataatcaaattaaaacagattaatattttggctaagaatgaaatgccatggctgggctcagtggctcacacctgtaatcctggcactttgggaggctgaggcgggcggatcagttgaggtcaggagtttgagaccagcctggccaacatgatgaaacccagtctctgctaaaaatacaaaaaaaattagccaggtgtggtggcacatgccttgtaatcccagctactcaggaggctgtggcatgagaatcgcttgaacccaggaggtggaggttgcagtgagctgaaattgtgccattgcacactccagcctgggtgacagagcaagactccatctaaaaaaaaaaaaaaaaggaaaagaaaaagaaagaaagaaagaaatgtcacacaaatatgtacttagtttagacactgagataaaaagcctattataagtataaaagttgcagatataatataatgtcatcctaggcagggtatctcaaaattgtgggagaataaaaaaatcccaaaccaaataactctaagtgcataatttcaactaaagacacctccctgcaattgaacaccctggatattttaaataaattttgaatggcttccattggtttcaaaccaaataatccgtttactcccacccatgacagccttatctgaaaaacattaacatgtgagatccttttcactaaaaagttcaaagttgcttgggtaaaagcagaaggttgtacaaaagagctgctgaattattgttcttgcactttcactcctaacttctctctgggcctcagtttctctgtccctgaaacgatttaggcaaccttccagagcaagcaaagaagccctttaattttttcacatactctttctctaataaaaattaagaagtaaataacacttattggtataaactcaagtttagtaaaccaactcaaaccataacctctaactttagactgggctgtgataaacagagaatctgtaaattgtctacaaaatataaccttaggacattggcactagagacaccagcaaacaaacctcacattcagttgcaatctaagataccctggaggggtaagcatagcttcattaactttcctagataagaaagtcagagccccaggcaaccagagtcttctcggttctgttggagcctccctgtccagagctcaacccgtggtgcttaatccaataatccaagtcctcctacctggtgccctagtctctgatttagttagtctgacacaccaaaaaaaaaaaaaaaaaaaaaaaagaagaaactctgtcccatgtatggtaaattcagagtgaaaagaaaaccatgagagtattggggttttcagtagggggtgcttttgtcccccaaagggatatttggcaatgcctggagatgtgtctcattgttaaaatttaggaggtgctcctggcatcagagtagaagccagggatgtaactgaacatcttttagtacaccagacagcctcctatgacaaacaattatccatccccaaattctgatagtgctgacgttgagaaacctggtctagagtagccacagatcaaacttgaaagcagaatgggactgtgtgtacagactgctctaagcaggtcttggttactagtaaattattgctttagaaagggaaatctaacaaaagaaagtaagactgtgttcctgctccgaggggctcttacttagcatgctgcattagttggccaagaaacaatctcttcgaaaataggatgtcagtattttctgcgcctgaagatagctaagtctcggagtccttgcttgtaaattagaggtcacattaacgttatctggtcatttgctgcggaagaatgcctggaaaccatgggagccacagtggttaaaatccatgccagcctcaggtaatcatggttttgcacagaattcacattctctgcctcagcgtcagtttctcaaaagcaggactcatggtttccccatgcgtaaggtcagcccttcaggaggccataatgaatgaggtggtgtcacagtggggaggtggagaagcaacactttgggaagttgtctggtcattgtgtgggagggatgacctttccaggtacttctatgggctgtgtgtcagggaccctttcatccatggggaggaagtgctccttcctgttatgctgcctctgcaagcccaagcccgctgtgagcctggaagtcccttgcaagcccagtacttttgtcctctcatgcgtcattctccccttcacagcactgtgctggcccagctgagagtggcgggaatgagcgggctgggctgctctcagttttgactaaacatggcccagcctgggatgtctcaccggcaaggaggatgtgcggaggagttcctgggggactagtgacccctttggccatgcgggctttaggaaacaccttgggctgtacagaggaaaggaactgcccactcacctcctcccagagccacagactttgggagatagaacaacatgctcgggcaggagtggcccactgtgctccacctcagggaaggcacctatgcccaagaggctaactacatatccccaagtgccagaatttcctatgataagactctgggcttaagggacattcctggtaatttgagggtgaagtaactgtattaaaaactcctcactcttggctggccgcggtggttcacacctgtaatcccagcactttaggaggccgagacaggtggattacctgaggtcaggagttcgagaccagcctggccaacatgataaaaccccgtctctactaaaaatacaaaaaattagccgggtgtggtattggacgcctgtaattccagctatgcaggaggctgagacaggagaatcgcttgaacccaggaggcagaggttgcagtgaggcaagagcatgccactgcactccagcctgagcaacagagtgagactctgtctcaaaacaaaaacaaaaacaaaaacaaaaacaaaaacaaaacccaaaaaacaaaaaacttgccactctttcactctccctaaatcaaatgtgattctcttaaaacatggtccctatgttgtttcaatgaaaacaggggttcagaaactgtccaacaaaagactgttttttgacttgtgaatttatgccatgaaagccttcaatgttgtataaattggatcccatttattagacacttaatttctttcactatacagaataaaatattgtgaaatcaagggtattgcagacgtacgagcactgaatgaacagggcactggaaataagcctgagttcatgctggatgtcaccttgggagggaccccagggaggctgtcagtcattgccagctctgggcattggcctccgtccctcctgtgcagttccagtgggacatgggtacctggggggtcagctgaatctctagttggtaccagcatagagggtagtcctgccatgaggcttagctaagtgcattgcagaaaaagagctccaaattaaccacggccctcagagcagctccctgtcacaaaaccttttgggcaattcctcttttgtacattttctttcttccttccgtaattgattgatcgactggttgattgatccacaggactctatttccaccttcaggccctctggtgaggcagaagccaacgcaccttacactgtcttcttgacaccagacatgagatagagcctttactcctggtccaggcagctgtggaatgggtcccagccaaattctagtggaaagcacttgggttttagaatcagaaagacctggagtaaattctgtctggtactctggtactcttttttttttttttttgagacggtgtcttgctctgtcgcccaggctggagtgcagtggcgccctctcggctcacagcaggctctgccccccagattcacgccattctcctgcctcagcctcctgagtagctgggactacaggcgcccaccaccgtgcccagctaattttttgtatttttagtagagacggggtttcactgtgttagccaggatggtctcgatctcctgacctcgtgatctgcccaccttagcctcccaaagtgctgggattacaggtgtgagccactgcgcccggccctgtctggtactctttagctatttgatcttgggcaaattacttacctcctctgaacctcagtgtcttcatctgtaaaataggcatggtataaggtacgtggaaggtcactgtgacggttcagtgagaacatgcttgtcaagcgcctccacaaagatgacctccatcaattctcttttccttttagtcactatctcatctctttctattcttcactttttgattgtgttaggtggatactggggctgggaaggggtgaggatttccgcttgtccatgcaagggtgctaccagaagaagatggggctactggggtgaagatggagacatcctcattgggaaacctccttgtttcatcactgccctgcatgagaaacagctcccttgccaccagatcaaagttctcttgtcacagccggtggtttacaaccccattgtgtaaacagacctcgttttcttatcttgagtaattgcagtttaattgggcctccttgcgatgcagttcccttcttacccagggctctggttgttggcacactcacttccagcccataggcctccggactccagtcattggatgtgttcacagaagggtcactctgctgtccctgcacttcttatgcagtgattgtgcttgctaccatgaagcctagtgaagacaccctttccttctctctgggaatcctggagagcaatggacaaattatttggtactagagaagtgggaatccacaaaaagaaatttaaaaccaaagtgggaatgagactgctgaaacataatgtttagggaaattatttatgctcataactcttagtggttgtcacagaaattgaaggaaagaagaaaataacctatatttttccagcatcttggactgtggggcttctgtaagctactaggttcaatcatcacaagctagagaatttcagagtcagaccacaatgtaaagaccatcttgcaatatcaggaaattcagatcctaagaggttaaatgaattactggagtttcctcaggtattttgttatagcactcctgtcttggtccattagtgctgctataacaaaatacctgagactgggtaattcaaaaagaatagaaatttattgctcaccgttctggatgctggaatgttcaagatcaaggcattggcagtctctgtgtctggtgagagtcccgtctcagcttccaagatggacccttcctgctgcattctctagaggggatgaacgctgtgtcctcagtggcggaagggagggaagaggccaaacccattccttcaggtccttttaaagggtcctagtcccatccttgagggctttgccctgacaacttactcacctcataatgcctccgcctgttaatattatcacattggtgttttacatttcaacttctaaatttgggggaacacatccataacaactccttacaaacacatttattttatttatttatttatttatttatttatttgatatttggtgatatgtaagaacttataatgtattttcattcatgtatttgtatgccttgtttatgaaaaattagtttttcctgattctggaaaaaacaaaaaaaaacaaaaaacccaaactccattgtgtagattgctgagcaaattgaaattactggatagtcttctggccatggcaagttccaccaaccgtgtccataaccaggttttgagtcagcctcagtctccatctccataccacaagatgcctaaagctgtcacccatggtaccactgggcttctgaaggcttcatgctaagcgaggggcaacttgaaacctgcagatctagaagcttacaaataaaatgtctctcacctaagacctctcagcaagagagtgtcaactgcaggtccccaggactgtggtctcaagttccaccccctccccgtccttcagcctgtttcagcgagtgttggctgtgagtggaggctgtcctggtctcaggctggtatgagttgtagtgttggtgttggctgcactacctccgactttgtgtgcttccccagggggtccctagggaagctaagcacagctttgcattaagagcataattagacatccccttctctacaaccctctgtgcttcagaattttttctgcagaaacctgcagcgtgtcaggcctgcactttcaccaaggcccaagcccattactcttattgttttaaaaagaatttcctggccttgagtctaaaattaaattgccctttgagagtttcctattttgcctgttcctgcttctcctggtggctgcaccccctcaccaccctcaggcttgatcagcaaactccggagagctggggagtggttctgtttgcctccttcccttttacctctcaagggagcagaacaaacgtgccctctgaacagatgtgccccagaaaccacgcccttgcccatgtccttctgaggccaaatacctctgaccaaaactgttcctcaccattgccaaacagcctatccgtagggtggttgggagggtacggaggtgctaaagcgtcttctgaggatgaggaagtccagactttatcagaagtgcatggagtcgcacaagggcaactacatgcaaccaggaggaagggtttaagcagagaaatggcctaggtattgcacacactttaattgagcacctgccaggtgagagcccctataactgttcagtagcaagactcttactgagcttcactgttctctactgaaatgtggggcagatggtgacaaaactgttggagcagggcttcgggagagaatgaagacaaacaatgtaagacctttcatgcagttcaagggcacattgtatgtcacagacccacattatacctccgataacttttggctctgcaggctcgcccaccgtggtgtggctgtttatccaatgaaggttgtcagtcgtaaggtcaggagaaagaatgtggatggatcagcaaaaatgacacagagttggcaaggaacttggagatcatggaggccgaactcctcaggaagcaaaggttcagagaggttaaggaatagcccagaggttacacagctccttagatgtacagcaggacttgaacccaggctgcttgatttctagtcttgtgtctttctgctaaagtgcatgagcatctatgacattcctagaaaaataatacaaagttatttccatggtggcaaatcatagtgcccatccacccagtgttgactcagccttgcttctgggtttaaaatatttttagaaagcactagcatctagaaatatgtatagtgtcttacatgtttatgaccctgtactaaggctaaaccctaggattctgaagtcaagcaaagacaagacagatttgctcctatggagtttaggctccaagtaacacatacagaaggtgagcaactagggagttactcatcgcatgtggacattgaagactgttctgctaaagacagaagaccgaaagaatagatcacccactccacagacacagactcctcatgttcatgattttctgttgtaaaaatatattctcctattctttttttttttttttcaatttttggggactttggggcatggagacagggaaagctatgagcaaaaggaatggctttaagatgtggctggctggaggggacaggtgaataggcagttccagggagatgactgtgggcagtggaggagggaatgggctagcaagatccaagttcctgactttgaagcactgggaagtggtgctagggaagggtcacaaaccaatgagtgcttccttgcaggaatggtggtggtggtcggcccaggtggtggctttagggctggctcacctcagagcagagcaggaccaaggtgtgtccattgtccaactagtttccaggcttccggggcttcatttcattcccaggattagatgggtggagcattcaggctgtgggctcatgtcctctggtagcctctttctaagaggacagggagagccatgctgtttcctccacggctcaccactgcatatgacgagcagagaagaggtgtgtgttttcctaagatgcccaggggaatcccttcctccatggctgcctggggaccactcttttattttcttttttcttttttgagatggagtctcacactgtcacccaggctggagtgcaatggcacgatctcggctcactgcaacctctgtctcccgggttcaaatgattctcctgcctcagcctccagagtaactgggattacaggtgcctaccaccacgcctggctaatttttatatttttaatagagccggggtttcaacttgttggccaggctggtcttgaactcctgaccttgtgatctgcccgccttggcctcccggcctcccaaagtgctgggattataggcgtgagccaccgcgtccggccaagaccacccttttcttagtggcctcttgttcaccacccctggtgcttaaagctctgctcttggcttccatgatcctgtatacttgcttgtttttcctcctacgtcttcaaccagtacttctttgtgctttttctcccttgtttctcctcttaactgtcagcagctttacagatccactttcaattctttcccttattgtcctgactgccattttccttgagttgtgctctacctccatcctttttgctgctaggtctagcttgactctttcctgccttctcccatcatgcattcaccttagagaccctccaccaagttgccctcactccatctgaactcaaccaaaggcaacattgtcttccactctccttatttatgtccgtcccgtagattcaccattttcactgcataaacataagcaatctaagtggcatcttggatttccctctcttcatctcctatgaccaatcagtcataaaatcatgtcgatttttcctttaaaacacatccaatatttcttatttcctcttcccctcgacacccatggcccaactctttcttcagaactggactacagtgaggtgagtgaggcatccacatggggtgcccccaaactcagtaatcaagttgaataatatcttaatgtaatatctttgaaaaatcagaattaatgcaaacattattatgaaaaaaatcaaaattttaaataaagtcaagatcagtattactgatttttcccaatgtggctcagcaaagctctcctcctgacctgtgtcagcctcctcgccttcttgccctgccctgtctgtcctactcagcaccatcaaatgagtctttcttgaaggcattgcttcaccatgtcccaggcctctagcatggcctctagtggctctctcctgaggccagattcctgcttggcctgcatggctctctacactgtggtcttaccctgccctccggcttgaagttttactacttaccctccactcctaccatcctcattgcccaagggcataccttttcctcctgcttgtcacctccaaacaacaccgtctttctctctctataacacctccctgaatctttcttattcctccttacatagctgtatatgttcttttttacctttggatggattatcttcctcttcttttgctcatgtggcccttcatcaaatgtttcagggcaaatcttactcaatcttaacagttattaccttagtctgcttcctgcaggaagccttccctgctgctattcccctccccctacacattggtacttaattctgtcccatccctcactgtaatttcctgtttacttgtctgtacgctcctaaggccatggtttatttgttgcttatattacattcttagcatctaacataatacttgtcatagactaggtgcaccaaatatattagtccatgaatgcacattgccataattcattaagtacctattatggaacagtaaccaccattcttgagcaatttgtacttaagccatgcaagctgcatgttgtgcacgtagcagaaaagacaatctgaaatcaaatagacttgggttagaattctgtctccattgttttattagctgcatggccttgggaaatttacttgacctcttaaaacctgtttgctcttctgtaaaatgaagatgaaaatactaatcttgcaggattgttgtgaggattaaaagtgaccatctcggccgggcgcggtggctcacgcctgtaatcccagcattttgggaggccgaggcaggctgattacctgagggcaggaattcgagaccagcctggccaacaggataaaaccccgactctactaaaaatacaaaaattagctgggcatggtggcacatgcctttaatcccaggttcttgggaggctgaggcaggagaatcacttgatgccaggaggcggaggttgcagtgagccgagattgcgccactgcacttcaacctgggcaacaaagtgagactctatctcaaaagaaaaaaaaaaaaaggagaccatctctgatgcagagtgccagggggcactgaacagatgtgtgatgtttgttaggtcctttcggcaatcacctgtgggatgggtgagtgagaacctgtcagatggttttcttaaacatgtggcagagatggggagtgttgcttgcatcttgttgactcatctccagttgcagccaagaaaggaagatgccaatgaagaggcccaataagcagggacctgtttggtgtggtgatcttttcaagcaatgaggtgggggctgggctgcccagatttctgacctgttaataacctgctttttttctcctcaactgaggcagtttcataatgaattggaactggtgatgttgttctcttgagtaaaaatatcattttcatactctatgaaatagttattaagtcagttcatgaaatgtctaataaacaggcaggtgtctagataacaaaaccatgaaaggcttctcaggagcatcccctggtaaagattctcgtggttaatggtagtttttgtacattattgccttctcattcttaaaaataggatccagtggctccacggaggacagttacagaggaactatgccttaaaaatatacagagggtttcatttataaaataaaaaacgtgttgaccaagagcccagctgtgggcagaagagactccaggaaaaaaaccaaccacataaaatcaagctgattctgtgcatggttgttactcaaagcctgtgagttgacctacaatatggctaccctgttatcacccaggtgtggacccacattattttgtgccctacctacttaccgattatctaccttctctgtcctctgcacattgttcccaggtcacttttcttcatcccctctttgccaatgtcaccttgccttcaagtggcttttctttagcagacaaaacccaaacttttaaatccgaattcaggttcttaggttcccaccaccctagcagggcctgtaacaaactacctgtctacctacttaaaagaaccaactacctactaccactttacgaggatcttttgtttttggcaaaccatgcatgctgtcccaaaagaagacagatgtgggtaacttagaattcttcacagcatttagaatcaaaattttctcactcaagaccctattcctacaactctgatacttgacattaaattttgaaaaaaggctctaaaggaatatgaaaaagatgaggatgatattgagagcacaaggcttgatttataagactaggaagtgtgttttgaactgattcagtttcaaagttttgttaaagacctgcttattgttgggaatccaaaagaagtatttaatgtagctgcttcaggagcatatagcattaaataacattccagcaaaatggtttgaagccaaaagtaaggaaacattttcttttcttttctctctctctctctttttttttttttttttttttttttttttttttttgggatggatattgctctgtcacccaggctggagtgcagtggcacggtctcgatctcggctcactgcaaactccacctcccaggttcaagcgattctcctgcctcagtctccctagtagctgggattacaggcgcccaccaccacgcctggctaatttttgtatttttagtagagacagggtttcaccatgttgtccaggctggtctcgaactcctgacctcaggtgattcaccctcctcggcctcccgaagtgctgggatgacaggcgtgagccaccgcgcccggccaggaaacattttctgactgatgctcagtagtgtattcttgctgatggttcccctgtctcttggccccacacacatataggtggcaaatctgccattgtacattttcacagtgctcatcaaggcccctggcaacagcaggctaaggatgttagccttcgatgcaacacaactggtgacatttccactgagtcccacttacatcctcagtacctttaatgcagttggaagataaacagccccaaagtaaacttcatccagctctaatttgaatgattttatgaatattatagaacaccaggtccaatatcatgtgcatggaaccttcttctgccttttgggttcattgtcatttttctctgtgtcaatatattctcttctgttatttttactgatcttaagtgaatgggccattgcaaattgggaaagggagcagatagtgggcaactgaatctaacatagtagtactgaattcttgtatgctcagaagaagagaagacgtaagttctccagttggagaatctttctgggagttgcaagctagtcttcaggggtgagaataccatcttatgagctacctttattgagaccttaatgtcaatagatttaaccatattaaattctagcagagtttggtttccttagttggggtttttatgaaggtgcagggacccaagagagtaataataaaaaagaaaaaaagaaagttgaggatgggccagtgtcgattagaatcctggtctcaggaaatcttctttctgtgaatttgctacttttccttttgtgtcttagtttttaacctatgtggccatttccaggaatgttaaggatctcttaaattaaaataatgcctaacttatattgaagaccaggcctcacatacttatcacatgcatttcatacaatatatagttttattaaatgcaattttatattttaatttgctttatatacaattttctcatacattatttcattcaatcgtcctacttcatgaagtaagtattattactttcactttatttttagaggttgggtcttgctatgttgccctgactgagcctcaaactcttgggctcaagtgatcctcttgccttagcctcccgagtagctagagctatatgtacatgtttccagtttctattattttcattttacaattgcatgaactaaggtttggattaaggaacaggcccaggctccatgttggtaagtgatagagctgggatttgaattatgtatacctggcttcaaagcctagggttttaaacacagcaaaacatgaccttccacacagcacatctgtcttccttagagagtactatgtagattgggattgtatattttatggagttcataaaattactaagagtgtggcacaagtcttcgaaaattggggcaaatggacaatttctgcctagcaaccaatgtatttaaagcctatacacactgattaaccaaaaaatgaggtgaattttattacataggtccatttttttttcctttggcatgtatcatttacttgttgtatgattgtggagtaagccttgtaagaatatcctttcatgacgtttttacagagtaaggtaccattaaaaataagccaggagtgtataaattcaagatggtcagcattcggccctgctgttaaccatgggttcttatttgaaggccagaaaaggtagtccttaaacacttgaagaaatggaggaagataaattcatacatagtctgagtcagaaattcttctcgttccctgcgtctttatgtggggggataagggaagaaaacaagagttggctctgttctgtcatcatctatagatgattcttacttacatgtgattggataatatgaagtcatagttctttagggctaaacaacagagattttcctcctaatatattttcttctattttttcttgcacagaggcaaggacctagcaacacttatgaagatcctcgaatgaactgtggtttccagtccaattatcaccagcaaagaccttgctaccccttttgggatgagatggcaactcaggaagttcctactggtcttgaacactgtgtctcaggtaggaacataaacaaaagctgggaatgaggatagagttgaaggacaatggaaatgtgatgagggctgcattctttcaaataacagctgccatggcttatgcgggtacagatgctattgttcttgaatggaaagtcccgggccttctccataaattttgggttactttattccccgacaggaagtctaaactctaggaatgggcccaagaaaggttgctttaggtcttcaccttgcaaatagttttgcctatcctgcatttcctgacacccgttttggctgttgtcagagagcctagaagttttgcagtcacagagtctgagctggataaacagaggtgtgtgaattgctcggccttcttagagaacatgctttctttcgatgatcatctgtttccattgttcctggcctctctgtccatgcccacctggatcccaattctttttcctctgtctctctctcccttctctccttccacttgctggtggcagtgctgccctctggtgagtgggagtctcctccagagaactctcaaatcaatggatctgcattcccagggacctcaggaatctgaagtcctcatctccatgctgttttcaggagacactctgtttctcacaaattccactagttcttggtttaccagctagtgttttttttttgtttgttttgttttgtttttaaacaaaaaccattaaatttgaatttgggaattttgaaatgatcaattcagatattaagttcactttcacatgagaccatgttatgataacatatttgaataccaaatagctagtcaaaatctgtgttttctcccaggatgaattcttagcataaaaatgtcattactcttacatgttgggaaaatgtaattctggggaaagacctgggcagggcatggcagggggagtcactaacttgaaggctactttttggttcagtgttattttaccccacaacattctttggtcaattacttaaataacagtggagaagtaaaataaatgtttgctttgttgcccatgctttattgctcatcaggaataaacagacgcagggcaagatgctgtggcactccatgggctgtgtgtatggtgggtgaggaggcatggggagtagctttccatttgcctggtttctctccagggcagaatgaaatagattcctgtgtcccatgttcccttgactcaatagccattgatctttgaggtattctttggcactgtcctggattgtagacataataatatttatgctgtcactttctgcttggtatctcagttcttctaagcataaatacaaatgtctcagctacctatccatttcacaagggagccaggaggattttgtacctgctcacacgtcagacttaaggactaaaaatttgaggacatgagaaaagtgatcctttaaaattctaaacaaaataggttttgtttgtataagcaaaaggtcaaaatggctgtatttatatttgtataattcttgaatcctattaatgccacaaggcttaagtcttatatctcccaatgcaactgagattaaagctgccttgctttaacacttgcagctctcgatggtctctgcttgctacaagttacatcttattaacatctgaggccttctccatttgctcatagcctgaagatcagaatgtctcttcttcatagcaaagagacatggccttccttttccttaaactgaagtacataaactcccaagtggagatgatttttcatgctgctctttgtcaagtttctcaaaggtaaagatgtttttatttcatggcctatgagacagtgtctgggaagcatatgaagaacagctttaaaatgcaaggacttatagcagggtaatatcatcttcttctcatagtttatagttgcaagaaggaagctggggtcaccccagcttttggtaggttgagaagattggggcatataataaccattcctagaatgacctgggttgccatcaactgcagctcagagatggtacacagcttccatcggggtgtggcctctaccagttgggggcaatctcttcacaaatgtgatggttgtagttcccactgtcctatactccctctgatggaaatgtttggcaagaaccctgagcctttctagcccctcctttaacttttgagcttcccagacgaaggagttggagggattatttctgggctgtggtccagctctcctcagcgatgggtgttgtttggacggggattgtggggttatagggaagggagatgaagacatagaccaaccagtgatttctccagctgtggtacatttccttggagatgtgttgaatataaagaaagagaaaaaatactcgacatttttttcatcttcttttatcctatttataacttcagtttccttcccgtcctccgtctcatggctactgcccaccactgctcccccttcacgttcatgctctcagaagggatgaatgaacttcttttccaaggactacacatctgtcagtgcagagaacactgacaggaggggccatcaaggaatgagcaagccttttcagaatgttgttcctattcacgaaggggcagaggctgaggaggaggaggaggagggtggcgggagtgtggagggaaggggaagagagaatcaagcagagagaaagtatgaatgagggaaagacttatcaggtgagtgggagagaatactaaagcgccaaggtctgtcgggaatcgattggacaaaatagatgataaagcgggtatggtggaagaaagaagagatgtgtgaaaatggacagaaaataaaggtggatattagtagcatggtagggaataatgggaaaggaagatgaaagatgaatgggaaagggaaaaaaagtggggagcccagaaaaagacaaggcaagaacaggaggggaagataacatgaaagagaaaaatagatgaatctgaggacattagctatacagctaaaaagggaagccacatttgcatgcaattgcctgtgcagctgtacatttcttcacaacaatcttgtagtcatcattttctttcatttctacctcctcctaccgtccgcctcttccccctcctccctatcagcctggagccattagcgagagccaatggggctgagtgctggtgttctgcatgaatgaatgggccctttctgtctcagcttctcgtcatccttctgttagggaaccttgtgaatcaatggagcctcttacacaagacacggctgaaatgtctgttgctgtttatagtctgactggagtggagccactgaccctgcctcctctctgctcccttcctctattctgtccctcaacctcagccctttctctccaaccaccataacaagaatcatttttacgtttcagtttcttgctcctgtctctaagagctcactgacgttttaccgtcattaactgtcatgactggttcctacccacagtcctgttggatacacagggtaacggtagcgagcctcagagtggtgcctagacctagctgaagtcagacactgcctgttttccaaaaccgacatcagagacccagctgagcacacaggacacaagacctcgtccatcccatcaatgccagcggtccatatttgatttcaacttcacccttatgatgctcatgaatggtcatagttcatatcagaaaatacgatgcttacttagcactcttccaaagtgttatagtatcaaattatttttcatttcaaggatggatttgtctgaaatcagccaaacttatggatgtgatgttgtgagcaaagtacacttttgcaaaatacttgcttagagctgggaagcagcctggagctagagaacataggaaacacaacttaccttcatgaggaggaacctatagtcttattaccatggtctttgattgatttgagaaacaagacaatactttttcttgtagaatgcagtttgctatgtctttggtcactgaacacagtaaaaccttcactcaaccacattcacagcctatctgccacttcccattcttcatgagaaaggacatctatttagtgtagtaggaaagaacccagacgctggacccaggttgcttgtgtttgcatcagctcttccgttataactgtgtgaccttagacaacttaatcttgtaacccagtttccggatctataccaatgattctccaagcatggtccccagaccagcagcatcactatcatctgagaacttgttagaaatgcaaaatctcgagccgtaccccagacttatcgaagcagaaactcccagggtacatgagaatcactttagggtttgttaagacactggttatggagttctacccccagggtttctgattcagtgattctaggctaaggctcaaaaatttgcatttctaacaagttctcaggtgctgctgatgctgctggtctagagatcacactttgagaaccactaagttagtatgtgtaaagcataaaacagtgccgtcacttagcaagcctgatatgaatatttgctattatgactcattgacccaaagtgcattttgggagtccaaactgggtttcattgagtcagagagtgacccactgattggttgaacacgtttggtgaccagtgccatgcccgggatactgagaaaatacatggaaaaggggaagcctcagttctcctttaaaacaacttctatgcaagtgtgtgtgtgggtgtacatttacatgctagagcaaatggtttccatgtgaaatattacacttatttatgacataaagtttggcagtattaatgtgtggctttggatctcactaaaatctctaaaacaaatttactaacaaaatggtggaactaaagaatgtctttcccaaataaactttggaagttcaagtgggagatacgctgagattccgagttcatagtccctcctggggctttctcatatggcctagcggctgggagagatcaaacctgggccagtgtttggaaagggctatccacaaccaggtgggatgtctcagcaggaagcacagatgcctccaatttggcttttaagtgttgagagcgctgagggagtgccagagagacttgttaaatggagactcaccttgctctgaaatgtttattcttatggcaggtctgtggttttacagaatggtgtttcagactatcatctgctgcacccctctcttctttcctcattcagggtgtgcttttcttttctaaagggtgtgtgtcaggttctttgttcttcagaacagaacggtcctgagagtgtgtgtgctttagggatgttgtaacattggacgattacaatattggactaatgctgtccctgagaaaaggctggacggttcttcttagagaagacttacagggagtccaggcaaagtgaattagaaacacaactgggccactccagtctctttattttattttattctttcaattttctagctcagtgaggaactgtctatgctaatgcccaactattttctaggacaagactagggaattaaactcctgtctttaaataaagtccaaacattaagggagatggggaaacatggacctttttggattctgcctggatggctgtgctgtttgggaggagcaagctgtaaccctacctgaggttccagcctttcacagaaggccgaggttggggcctagctgccctgacaagctactcccaggggagagtactgagagaagcctgatgcaggaacagccttgccatatatccccatcccatctctgagagggccagggaaagaggaaggaaagcaaggccagcctagcccaagcagtccgctagggagagtccacatgcctaatatctcccgcacactcgctctgtcagtttgctcatctgatactgagattctgcaaatgcctgaccctattctccataagtggagggcatgcctctgatcagctgtggactgaagttgctcctgcttcctacatggcctctttctttttcctcccacctcctgctgccttggtagcttttgagctggtactatttcatattcagattacaaggtcttttggtatacattttgagtataattgaagagtgttaagtctaagcagagggtttggcctggtgttgtgggaagagccagcctatgcctcaagaccccagcagcacatcccggtacaggccttcggccttggctaagtccactgagcttcccaaccctcacctttcacaggtgaaatacactctttccaaagagttcttgtgtccactgcatgagggtagtatagttaaaaggtcgtggcctatcgcaggggaccaataaataaacgctgcttttcttctttttcctttcgccatggtgtgagtgtggatttaggtgaatcgaagaaaccagatgcccactcacatctgagtcctgcccactcttatcttgctcaaggctaatgtgctagcatctgcccactgtgcctcatttcaccagccaaaggagaggccagcctggtgagggccagaaagagctgcacacccaggttagagaccagagaccccatgctctcaggagtgaccccaacagccccgaggaaggagggcttggaaaggcctttacaaatgtaaatcacccctttaggtccccgggaaggaaggaaaccaagacagacaaaccgaagcctctgggctgggttcgtggagtgacagtggaaaggcaagccttccgccggcccgccctcgaactcgcagcttctcgaacatcctaggaagtaacagcattgcgctgggactcccagggggctgcggagagaaaaaacgttctctcaactttttcaaaccacaaatatttggtccgagttgggaaaaggtccctggggcaccgggttcttatgcgattcaagcagtttgacccctctcctggaactcctcgcacgggggtgggacggtggacgccgccggctggcgtcaggccccgctcggctccggccgcggcactgggtgaatggacatcttcgggtgggccgatgaggtgggagccggagcccaggagaggggcgaggggcgaggggcgaggggcgaggggcgcgtgagagtggagggtgggggcgggctgcgccgcagggacagcctgtagtgctgtgtctggccgcctagagacacgggctctctctccagatgttcactgtgtttatagctgccgaggcaggagacccagctccctcattaataagttgctttcttgcactgcagccaggggtctcagcccggagcctgcagctggaggaggcggcccgctcccctcccccagcctcccggtccctaaccccaccccgccttcctcccctgcaatcctcccaaaatacacgagcacacaaaaagaaaaacaccagcagattttttatttcagagagtaaacacttgggccatgggggtctggaggttatgggaaaagaggaaaccatcaggctaatcaggcagcacacacttcccctgctgaaataaaacagaaatcattgctccgcagggcgggagggttaaccccggcgctgccagcaacgcgggcgcaggcgaagccggcccggagctggggcgtcccgggacgagctttccactcccaggagaggagggaggagaggacgggcgtgggctgcctcggcccgaacctcgcccttcggcctgtggcagcgcctgggccccaagcggggcttaagaaatagacggttggaacagaagagattctgggcttagatttagttttgcaagaggttacagggagttccagataggttggggacatagagagataggtaagagtgtgtgtcgttaccgtttaacaaaggatcaagagagctgggtagggctgtttggggcacaggtttcagctctgccacccaccagctgtgcaaccctggacgaatcactgaaccctctgagcctcagtttcctcatttgtaatataatagtgcccacctcacagaattactgtgaaggaagaaattaaaaaaaaaaaaacgtattgaatgtggaaatggcaaagcaccaggcatggcgtggagaaggctcttaactctgatttcgtaggttaccttttcatacattactgtaattgcccggggttcccctccctccttttcttccttcgtctctcactcccccacttctttttctctctcttctttttcctttccttcccttcccttcccttccctttcctttcctttcctttccttccctttcctttccttcctcgctctttctttttttctttctctctttttttccctattgaatgcctccaggttccatcttcactgtcttgttccctgactgctgtctgaagagcataaatagctcatgggacagaggtcatcagtcaaacatgaaatgtagttgcactctgagaaaaatcaccttcccactgaagcatggggcaaccttggctgtccccaaagctgccagtgtgagtggcccctcagctttcagtccagaccctgccccacatcttgatctagtcagttggccacaccctccccatcatccctattttttaaaaatagggatacgcttctcccactccattcctggacatcctagttagattcctcatgacctttgaagaattgtttgcctctttcaaactttcttgctatttaagaaaacaggactttgggatctctgttaggtgggattaaaaaaaaaaaccaaaaaaacaaagccaccaattttcaaagttgtgtcatcagtcttttccatacctcctgagacttgctgaagtagtgcctgagaggcagaaataccagtgatttaagtagctacagagttccagttgcctttgccatttttactggctatcttacatacctcatacatttttaaaacatcaatcttgacaactttctgccatgtcttagacctgctgtttctcatggagcaggggttcttgcccaggagagtttcaggaaagtgtgatcctgctgaaattttgtgcagaaatttttctaaggatctgtagctttcctctgattctcaaagttgtctgagactcccaaagaggttaaaaactactgttccaagggaaaggtacatttgtaccttcctgcggcacttagcacattgtacttctagagtacgcagtgcacattttgttgaactgggatgaattctctggtataaacttccttcctataaatcccttctccctgctctggtcagtcccaagggagtgtatttaaatctggaagttgtttccattccattgtctctgagacagaagcattgcagccttgcccaaagtctagccagatctctcctttttctttaacatatttctttatttcatgctcctcaggatgatctctgcaaacaccccaggaaaactgtggacctgggacctccctaaagtgagctggaggtagggatggggagcttcagtctgtgtcaaagcaccacagaaaagtcacactatgatctgcgtctcatggcctttctagtgcacagtagattttccccagcatccttatgtcatatagggaagaaaagatgtagaaatagtgcccctaaaggggataggggtgcagaaattcagagctaacaccttcccccctgcaaacaatgtacacttggctcttcgtatccatgggttctgcattcatggattcaaccaacttcagagcaaaaaaaaaattttttttaaagaatatttgcatccgtactgaacatgtactgactttttcttgtcattattccctaaacaatacagtataacaactatttacatatcattcacattgtattaagtattataagtaaatttgagatgacttaaagtgtatgggaggacgtgcataggttatttgcaaatactacaccattttatatcagggacttgagcgtatatgaattttggtatcttaggcaaggggttttcctggaaccaatccctcatggccaagagactgtatacaggaatgactatggcagaaaaactcctggatgctacagactctttcagtgcactgcctctgaaccaaggtcattcttttggagtcttagccctcatttctgatcattagcttctgttggaaccattgactgttaacatctactgctacaaactcacttagacaagaggaggccattttcagacttctccagtctagacagattacccaacccaagtcaactactttgaacttcccagcaatgtcttagcattttcatctttggtcaatatatcaggtggatattcttagctgagcagggcttagagcttgcgtcctggtgaatgttcactggttgaattttgggttttataatgaaagtggctagctccttgagacagaaatgcctgtgggctgttcctggagagttgaatacagattagaaataacagaaagttgttgtgctcacttcaaccatacctgaaatatttggacatctcatcaatactttgggctttaaaaactctgaatttaaagtttctgaacaataaaaccaaccaccatgatgccacattttcttgaattgtaatcttttgttgtgtttttaacatggtttagatccctcggaacttcctgttagatatctgtgcatatttctatgttgcttcttaactgatcaattgtaaattaaaatagagatgaaaaatagttcatagcccattcttttctaattctagtaatcttattccagaaagtccaaaagaaggcctgttcttctagagctgcttgagaggtacagtggttaccattcattaaatgccttctgtatgccgaggattgcacatatgtggtcttttgcttttacaatattcctgtgagggtgatactattcccattttacagatgagataaataagactcagagaggtcaacttacctccccaaagaagcctaactaattctgggaggcaggttggtaattaaatgtaaatattcctccaaagtgcatgttcttaaccaccatacacattttgcctgcccaaacatttgttcacatcttcattgctgtgacaattgcccacctccgggataagaatcgataaactttcccagctttcccacaaagcagagacccatgaaaattccacagggatgtaaaagggaaaacaagacactgttacctgatttcttttatatcttctctgtggtttcttggagtcccatattggtcatttaagggcacaaggaagcctgataatttgcaaagctcctccagagaatggtttttcctttgttgggcattcagttagggtctagagggtttgcttacctcttcacctaagcatcatactccctttgtccccttacactgccccccccacccccaaccagccagctccgtgagcagacagagtcactgagcaagactaaaccctaagaagtttctgaaaggttatacccttgaagctacccacagtgtacacagcacgtgctgaagtttacacagacttcccagacctctgaatagagagactaattgtggggaagctgcttttcagcacacaggatgggctgttccctgtgggttttactatcaaaaggcttttaaaagtgcagtgtagccattgttgaatatttcacaatgaattaaataccatttctctcctcgcagctgttccgtgtgagtgagtgtagagtgcattttttttttccttttcctggcagaagacgtctgctgtataaacctaagcactggggtaatgagattatttgtgtgcgaattctttaggaaaagcatttctttattttaaactcaatgtgatgcagagctgctgctctggagacggggagagggagagccttggaaaagaatggaattgcaatgtctttgagcagaactgggagaaggcaggggtgaggggctcagggattaggcttgtagcttcagtacatttatccacatttccctacatttccctagggctgcctgcatctctcagccctactaactgggctacagaagagggaaattccatatatatatatatatatatatatatattagtaaacaattaatcactttttcatctgccctttcaaaattcctttctgatctcacaggtttttaaagcagttgaagaaacagtttgctctatgcctatttttatctcaaagagcttttaatataatttaaattataaagtatacaaggaactgactttcttatgacatttagggcagtttccataatttggacatactcagctttaatagtaccataccattaattgctagaacatgtatccacacatctcttgcttgacttttcctcttcagagttttcatttatctttcatagacattgagcttcaggtgagcagtgagttggaattaagtataaaattaattaagattaaatacaagtgtagacttaactcttcctaaaatgtcatcagggagtcaacagctgttttttagatccactgaagactaagaacacaatgagattaaatggaaaaacagggatttagattagtgaggggaaaatatgactctgaaatccattattagagtttataaattacctctcctctcaaatatctttcaggatatttcagaaggagtatgagtaatttttttattattatccttctggttcgatcacgtaagataaaattttcacaaccttttaagggaacttaaggaacttaagggaatgctttaggaaattattgagtgggaaagagcaggccagatgtgaaaggagagacgttgagtgtgagagtaatcttttaattctgctgcagtgagagagacaaaaaggaggcatgagctgggcatgctgatatgaaaactcaaccagtagatttttggggctaaggagggaaggtctgaaatgtacttctgcacctcccccatagttactggtcacttacttttctcattttccaaacttcccaatgtctatgtcagaatgggcaggtagagagtgatcatttttccctgtgtttaacagaagggaaagttctgctgcaaagatgggggagagaatctatgctgttctggtagctttgaaatgcataatcttttcgctcttcctggctatgaactagtacttttctatgtgcatatatatcacattcagtttattttgaaaaataaattattataaaaaaatacctctttaaataatttttttttttttttttgagacagagtttcgctcttgttgccaggactggagtgcaatggcacgatctgggctcactgcaacttccgcctccagggttcaagcaattctcctgtctcagcctcccgagtagctgggattacccgagtagctgggattacagtcgcttgccaccatgcccggctaatttttgtatttttttagtagagacgggttttcaccatgttagccaggctggtcctgaactcctgacctcaggtaatccacccatctcggcctcccaaagtgctgggattacaggtgtgagccaccacgctgggcctaaagaaaatttataaatcaaagaataatagggaggaaaggcattttggtgtcatcacttaagggttaatacatggagggtgtgttccatgggtattttttgtgacaagtgttcacctgagtcacacacagatacctcagacttaaaactgagctcactgctttctcttgactctgtaacctgtaactctgtagctagtggaggggttgttgctgtctttatcttctctcttgttttgatgaaggtcactatcagctaccaatcaccaggctaaggaattggtagttattgactccctctcccgttttgttttgttttttttttaataccttaacacttgtgttggttaaggaaggatctttttgtttttaagtggcagaaacctgaatcaaactagcttcagtgtaagaaagaaattcctgacttaacagatgggaagtccagtagaagagtcagcctggtgattccagggaatccaataatcttctaaagtctctcttttaccctcctcttcctccctcttctcttcctgctcttcctcctccctcttccccttttccttttctgtcattctagctcacatctgctttggtggaagaagagaagtccatagtcatagacctcatcaaagaatgccttgttcataatggttatatataaaattcctggtctgtgtgcccatccccaaggcaatgaatgaaataatggggctggggcattctaattcaccatgtgagacatgtaccacctctgtgaatagaaggtgtagggggtactgtgatcagcagttccaccagaactatactgtgtaaaaaagagacagtttcctaaaggaaaatggggggtcctgtactggaaaaagaaggaaaagactacagatagaaaagcagcagatggccactctattttcatattcagtcacaagtcccattgactttatcttccacattgttctcgtgtggagcccttattataatcaatacctgtgttgagaccccaattgtgttcccatgatactggtgaatacctgtattgtagagatcattgcaccatattgcaatcattgttttgtctttcctctgagactatatacagcttgaggtcaggggctttgtccttgtcatgtttctagtacctagcagagtgcctaaattgccacggacactcagttaaggtctgtggagaatcaaaccaggttattaaattaatctgtcaggatcattgtgggtactacccaagattataaggattggttaagaagtaacaaaaattaaaacaaaacaaaagaaaacaacacaaactttgcagtaatttggaataaaacccaaagatcagctcagaagactttttgtgttatggttcctctcattctaaggcaaaaggacttcaccatttatttctgtatcctcaatgcctagcctaatacttgccacagagcagaggatttgataaatatttgtatcctggttgtccaaacttgtcctagctagtggagggatggttggtgtcttggtcctcagttagatcatgggtaattccaagttactgactggtttagggtgtcagtgacattagagcatctttactttgtcccctattaatcaacacatatttattaagcccttgttcttcatgaggcgttggggctatgaagtgtggttcagtctcatcctcaaggaacatcacgcaacctggctgccgtgctgagacggacacagccaagctgcagagctggtgagcaccaggggactgggaatgatgagagggatggtcctgttgagactagaattatggagagaccctcctgaggcctcccagtcacgtgaaactgagggtgagggggtttgccttgaggagcactcattcatccaaacttagttggcagaatgaggacagagctcgatttggaaaggggttgttttactggtgtttggaagagtggccactccggctctgctttatgtatccttgagcgttgttattctttcttctctctcctgtgttgattttcacctccctcaccctggtctggcctctccgtggccttcctgccgctttcagagatgagcttagactccacacggggctcccaatctgaatgaaatatcccattcctgggaccgctgctccctcacttcattagtgctccttgctgtttataaagccaggagataatatttttaaattccatttggagtttcccgggcagcctctctctaagccacttaggaagtttagaaaagaaggtcatggaaatgttagacatttttccactgaactttggtgaagcatatggtcttaagatgatgttcatagaccccactgggcaggctttcctggatgataggaaattctccctctttttttgtcttgccttcacctccagaaaaccaacttttttttttaaacggtttattgaggtgagctttattgagatataattcacatactatacaattcacctatttaaagtgtacagttctgtttagtgtatttacagtattgtgcagctatcattgcaatttaattttagaacatttttcttcttcttcttttttttttttttttttgagatggaatttctctcttgttgcccaggctggagtagtacaatggcacaatctccgctcactgcatcctccgtccgcctcctgggttgaagtgattctccagtctcagactcctgagtagctgggataacaggcgcctgccaccacacctggctaatgttttgtgtttttaatagagacaaggtttcaccatgttggtcagactggtctccaactcctgacctcaggtgatccgcccgccttggcctcccaaagtgctgggattacaggcatgatccactgcgcccagcaacatttttattcttcttaacagaaatcttatatccattagcagtcgatcttcattctttctcattcttcctgtctccacacctcaacagctactggtctaatttctatctttataaatttgcctattctggaattctcataagtagagttatataatatgtgacctttgtgactggccactaagcataatgttttcaagtttcacccatgttgtagcaggcatcagtatatccttttatcatcaaaataatattccattatatggccatggcacattttatttatccataatttgatggccatttaggtgcttttcactttgtggttattataaataaggctgctattaacattaatgtacaagttttttgtgtgaatatgttttcatttctccaggggtagaatttctgggtcgtatggtaactctatttgtggaactgcccaactgtttttgaaagtggctgcttcattttacattcctactagcaatgtaagagggttccaatttatcctcatggtgaatgagcagtagtatttcattgtcgttttgatttgcatttctttaataattaatgatattgagcttttctcacgtgtttaccagtcattcttataccttctttggagaaatgtctattaaaatccttggcccgtttttaaattgggttgtctttttattgttgagttgtaagagttctttacatattctgaatacaagcccttatcgggcatataatttacaaatatttctcccataaagtgagttgtctttttactttctggatgtttagaatttgcagcaccataggttttagatttgatatagcccaatttatctattttttctttgtttttctagtgcttttagcattgtacctaagaaattattgcccaacacaaggttatgaagatttaatcctgttttttcttatatgagctttatagctttagctcttacatttatgtctctgatccacttagagttaacttttatgcacaaaggtctagtttctttctttttcgtatgtgtatctggttctcccctattatttgttaaaagagtattctttctccattgtctgtccactgtcgtggatagagatttttaaatacatatgtcacctacgaactacctccttaatctatggcaaaataattatttgtattaagtggttcctcaatactgctcactacagtgcatgagtattttgaggatacctgagttcaaacctggtttggtgtgtgtgtgtgtgtgtgtgtgtgtgtgtgtgtgtatgtgtgtatgtgtgtgtgtgtgtgttttcacctgaataaaactaccagtattcattcttcacttttagccaggcactgccatatattttacatacattaccctgtttaaatcttaccaaagattctgtgaattattaactccattttacagacaagtaaatttttcaggcagggagatttatgtagttgaaataacttgccaaaagttacactctttgtgagtgacagaccccagatttgagctcaggtcagcctgactctgtagcctggtatgaaacactgtaccggtccttgggcatgttatgtgaaataatagtaaccaggaaaagcaacataaagcagccactatgtgcgcaatttgtgaagaatgcagatctgaaaatctagttatgctaaatggctatcaatttcctcatctctaaataggaaggttaacgcccccccttacctcctgaattacaatcaaagtatttaattttcaagttacttctgtgtgtttgaactctaagaaggaaaaataagtcagtagacttttctaggataatttcatcatacttttattaatcagttgtttaaatctcatttaatgcgagtgtttctgcttaagacattaatttttttttcacttttcttgtattttcttcggtaagtttcaaagaaagtcactaatagttgtgtggcaaacatcccaaatctactgaatttaccatatacaagacttttaagaaaatgaatatattcaatttgagggaataaatactgtgaatccaaggaaagtggaaatacctcttatattgaaggtgtcaatacatattattcctgaagtcatcttctaagtcctcttccccatctcattacttcttctcccttcttgtaggtgcttatttggcctttggtgaagaatttgggatatatagctttaaaacaatggaatatttcccagaatgtattgtttttgtgtttgtaatgctatgtcctatttgtcttgaagtctctattggaacatgttattacagaattccaatatacacgtataagtggtaaaaaaaaagcacaattagaaatatatgttccgtgaccagctgctcttatttagtaggtttcccagtgttttcctgctgcagctgctaggaaggtgtgcacccgactttgaatgttttgggtgcaggagtttatttcatgtcagtttcccttgctccttagttcccaggggtagggagctgagcccttgctttcctttcctttcccctaattcccaactgcgatttaattcctcctccagttcatacttgaactcaggcagatacatcacttgggatcctactgtatccacctcccaatgacagctttgcttattccgactctgagtggagacaagtaggaattagtggattaatagtctctttattcaccatgccatgctttccctccctctccccctacacactctgtgttagtgggaaaataatgtctcaggtaaattatggtacatagtgataaaaggtctaattaaaaaaaccaacaaatgacgactaaagacttggcaggagaaaatcacattttaaggactttggtaggtgaaagtgattttggacacatgaatgatttgaaagagttgagctaatatgcatcttcagtattttgcacagctgacttggatcaaagttgtgcaaaacattggagagagtctctgtaccctggacagatactgcatacagtgaggctgggatcctttcccacctcttaggcatttctcagaggtgctgtgaggtgatgttggaattattttgtgatctttcatgctaaataaggtaaagcatccctattgttttaatcaaaggaaagaggtgatgtgtattcatatttacttctgaagtttgacacataaaaaatttaaaatgacccaaactttatgaagagagtatgaaatgaatgtctgctaattgctcttctatgggatctgatttgcagaattacaaggccagcttagcctgaagtcattgcttaaataacctgctaactggaatgtattgacatgaactgtcaacacggctgctcccttcaaccaattccaagctctttctcctcctaatgagaggcttcttgtgtgtcttgatttggctgttatgcctcttaacattgctcacagtctcaattggatcagaaaacagctttttctagaccacagaatgtatgctattctctgaaatcttaagctcttaagatctctacagtctgtttacccaatgtattgaattcttgtacccaatatctcatgataatgttcatttatgatacatatttcttctcttcttactatttgaataaattatattgactatatgcatcttatatttttatttgattaatactatgacattcattccaaatcattcttctttttcaaccatgttttccatttatctttgttgaaacagttttatttctgccttatagtttacttggtctgtccttgacaaattaacaggtgtgattttcacatgcttaattctcaatggctgctttgtatacatgtatacatgccaagctgcatctggaggagacaaatctatataaaaatgagggtctctttgtctttacttattatcctattttttatgtatttagaggtcttagattactcttctttaaggaaacatctgagaatggaggcacactgtggtaagggagagtaataaagaacttactgccagccagagtctaattttacagcttttaatccattatgatcattataaagtgagcattccactttaacaagtaggaaccttgccagaacaaagtgactgccaaatgaatgacaatgtttgcttgcttcatctcaggttggaggttgcaaactcttactgatacaattactgattaactacaagatcatggaatcttcctgttgctttgtgtcttaatttctctttctatctggaaggtgcccatgaatattagaaagacacaacttttcaaaagttgagattgtggtggtaaaatagcaaggaaagagctggccctaaatgtcatcatgcatagacatgaaggtacacaggattcatcaggcagtgagtgatttttgccataagacttgatgtgtcagggatgagacccactcattgactttggttgtttttaaatgtttgggatttggcagagttcaaaatctattttgccaagtcctttaatttttcttgttttccaataaaaaccctagaagaaaatctaggcaataccattcaggcacgggcaaagatttcatgacaaaaacatcaaaagcaattcaacaaaagcagaaattgacaaatggaatctaattaaatgaaagagcttctggacagcaaaagaaactagcatcagagtgaacagacaacctacagaatgggagaaaatttttgcactctatccatttgacaaaggtctaatatccagaatctacaaggaacttaaacgaatttacaagaaaaacaaaacaaccccattaaaaagtgggcaaagaacatgaatagacacttctcaaaagaagacatttatgtgtccaacaaacatatgacataaagctcaacatcactgatcattagataaatgcaaatcaaaaccacaatgagataccatctcatgccagtcagaatgacgattattaaaaagtcaagaaacaacagatactggcaaggctgtggagaaataggaatgctttcacactactggtggaaatgtgaatttgttcaaccattgtggaagacaatgtggcaattcctcaaagatcaagaaccagaaataccatttgacccagcagtcccattactgggtatatacccaaagaaatataagtcattctattataaagataacatgcacgcgtatgttcattgcagcaatattcacaatagcaaagacaggaaatcaactcaaatgcccatcaatgatagactggataaagaaaatatggtacacacacaccatggaatactatgcagctataaaaaagaacaagatcatgtcctttgtagggacatggatggacctggaagccattctcctcagcaaactaacacaggaacagaaaaccaaacactgtctgttcttacttatcagtgggagttgaacaatgagaacacgtggacacagggagaggaacaacacacactggggcctgttggaggggtacggggaaagagaaaatcaggataaatagctaatatgtgcagggcttaatacctaggtgatgggctgacaggtgcagcaaaccacccatggcatatgtttatctgtgtaacaaacctgcatgtcttgcacgtgtatctgaaccttaaaataaaatattcttaaaaaaggaaaaaattttcttgttttcattgctaattttgaggtctatgagcatttcatggaaaacttaaattgtatatgggatttctttatagtctagtcatctactcatctgtatgggacatccaagaagactggtgagtcttcctaaaaacacttggaaggaaattttttatggtctaaagattaaatcagctagaaacctcaaagactagtttgaaaagttaagctctagaactattaagcagagttagaaaatagctggcctgttctccctccatttttatcatttaaaaaattgtatttaaaaagtgcatgtgtaaacatgtgtgcatgtgtaggagatctgacaatttcaaacaaagaaaaccatgtcataaaataataacgccctttactatgcacaaagaccatctgtagcgaagctggaagtaggcctgaatgtaccatcttagatcacatttggtataaagtggttattttattcattcatttagtcattcttttacttactcatttcatttactcagttactcagttatctattcttccaacacttattaagcattcactaagtccttgtgtttaaactggaaattcaaatttaagtagaatatgattgctgttcttgaggggctcagattatttttggtaacgtaagcgccccattggaaacctatatgtgctgctgagagcacagagtaggaagtgcctgattttatctagcaaggccttggaaaccatgggggaggtgatttactgctgagtcttgacagaggtgctgggcaggtagaacagggctttccagaagggaaaaaagcctgtaaaaatgcataaaagagtgaagaactagagtgtgttcaagggattgccacaagtccaggattgtcagagagcagggtccctatgtgggggagaaggtgaggtgtggtcaaaaggtaaagaggaccaattttggccttttggactgtgcttggattttatctgtttggcggtgaggagtatctaagggagtttaacctaaagggtggtcttctgcatcctgtttttagaaatctggtagaaatggccaccttggctgcatcttgcccaggctctctgactttcagaaaagtccttctctgacactctcctgcaatggcggcggcagcccttgtgtattgcgatgtggggaatgctggccaaagattttacactgtgatgaaaacttttgcctttccaaataatttattttaaaagcagtatgaaccttatccattcctttaaggtggaggtgactagcgtctgggctttggatggatatggagcgtgaacaaactcaccaacattgataaggatggcttttcaaaggcgacggctaattggcgatgggagcggggctaaggagaagtggaacattggcttgtctatcactaggctctttgcagaggtttctgacagaggaaagctaatcaggagacctgcatggggagagaggcgtgttatttaattagctttacaatgggctgacttgaaggcacgtggtggttttaatagagggagatagatgtccttttttgcagggctaattgttgggaaaaagcagggtctttgttcaggcccagcatgagggctgtgatctcttggagcctagggctgcccctgctaataattttagacagagctattcaaggctgctctgtaagagaaaagaagaacaagaacagtattgtgtatgcaggatcactgcccaaacctccccaaagtcactggggaaaaaaaaaaaggagagcaagaggactcagccatgtacattttggagtatgtccccatcatttatttgctctggttgttggaaagggcaaagtgacacttccatcaacttggagctgaggtggggtgacttaactaaacacccccagaaaaccaattaagtctgctttcccaatgatacagcattcatcttgccaaaatggagcgggcaactagcgagaagactatgactgttctctgctgccaggcttaatggctgggtgccaggcaatggtagtgccagaatgcagattacatagctgatgtaaatggcaaattctgtgtttttagagggcagtcctaagagcaccgatggtttgactggtggcccaaggggcaataagagaaacctttccctaaggttcttttgggcaactggtcagcataggtagttaacaccagggagcagaatactttttctgaattccaggtggcaagtccaagcttgcagggagtgctatctaggtccagaattctgtagctaaaatgtatgtgtatggcacaattagagatagatagaggtttaggtttatagcacaagttaaaccgttcatgccaccacactccagcctgggtgatagagcgagaccctgtctcaaaaaacaaaataacaaaaacaacaagaactgttggctggcaggaaaagagacagccgaggaaaatgtaagatgcaataacatagaaaaagacttctgtgaagtgagtgcagtaaggtgctgcctaatgggtgctagtttgggaagtacctaggcagagtgctatgggggcatattgaatagcatgtgggattcttcccagattgaaagtcaaatgctgaggccagttgcttaagaaggtcttattttgtttaggttgcaaaaatcattggctatcaaacgtgcaatccagagagtggagaacccaatactggaagaaattcaagagggtacatattctctttgctgctaatttgtaatgtagctgtgagtatatgattagaactttcataattgtatctcacatctatatagtgggaattaatcccctttcatccaagagggatggtgtcaaggatttgcatgatttgcatacctagaccaaaacttatctttgtcactatgtcatgattttaacagcgcacatgaagataggacactgtgtcctcatttcttcataagaatactatatactacagtttggattaacattcatgaaaattttatgctcactaaatccgaagtcacaattctgatttttaaaatcaataatagcagtgaagggttactgagtcttcattctgcatcatgcacagtgcaaagcacttggcacccattcatctcatctcatctcagttcaactctgtgaactaggcactttccgcatctccattctgtagatgaagaaactgaggctttctgaggtcaaagactgacatctggagagcagccaagctaaaattcaaactctcgtctatttactgccaagcttgtgctcttaacccactctactatgttgcctccctggttattttagagtttaaatttattctatagtgaggaaaccaaagcctggtagtttctgcttggcaagaaactgcaggtttttgtatggactatttggaaacaggaacacttatttgcaatagcctttttacctccacacctcagttcaattcaattcaattcaattagacaaatacactctgtaggagaaagcattagctcactaaaagtggatggatatgtagatgctggacctttcctggatctggaattttgttgccagccatctggtctctctcaatgctgtggaatcccctgaaagaaaagtttataatcttcttgatttttagaaattctcaacaattattcagaattttaaattcctggaaagggttctctcttgggaatctgccatgagagcgctgactgccctttgttttttcctctcacagtccattgccagcttcccacccagctgcacctcctcccacccctcctggatgggtcccttgtggtacttcccacccaaggcctttttgtgatgaagtctttcaagatggtttcccaatctggggagaacacatgtttctgatcattctgatgaaacacgtttccattaagaagcaacttctatatgctttctgctttcttcattctgcacgttacctgtcattacctctcactgccagccctggactcttgaaagtgtttcacaggcctgtctgattaaatggcgccctcttacacgtcacacatgcccattttgcttctcttcttttcaccaactcaacggaagaaagatttttattgtatgggagccaatccagatagatgagatgtgagctgggtctgttccacctcatgagtcatgggcaggaccatccactacattctgactccttcacagggctgatgcaagatgtggagtgagcacagctggctgcttgcaaattaaagaagacttcatttctttttggtccttaagagctgagaatcaaatgtgagctgtaacgctggagaaattgacatgtccctttttgagcttcttattcaaatctgtcaactttacatcattggcatgcttgatgctcagtaaattctaaatatgaataattacactggacaccctaaagttgttttaatgaatttatgttcctgcatatttatgaaactcagattctgtgcacccttttcaggagagtacataccagaaaagaggtttaaagcagcatgggaacttaaaaagtgctatgcattttacttcctctgttggtagagttagcattggtgaagctaggattcatattaattcattatgacactataatgctgctcattgaaggatgcctaaggtaagataggcatagattcttgagtaaaatgtttgtggatgactgcagtgacatactcaaagaatgttatatttactggctaagcaggctgttcttagtgtgacacatcaatgttttcttggggctcttatacggaactggttctggaagaagtgatgtaaaataatgtgtgttcatgattccccctcagaactcaggagaaatcatgagccctcaccaaatccaatatttccttggtttttaggctttaagatcagctgccttttctgttccaacatcttgattacccattagtagatacaaacaacaaagtgcagagagcaatactctacttcgacaaaagtggttagggctgctttctatatttctgtgccacctgctagattgtagcagctccatttgatcctccctgtccttttcattcccatcttcactctcagcccatccccatgtccccccatttctacttccaacccatacccttcctcaatatagaatcacctgtatagccagaagatatatttcaaaatacagtgcttctggagtcctgacagattaaacttgagaaggtgaaagggatttgtagtaagcaccctggctcaccataaagcatgtaacagtctattctttctcataaagatggaggaaattgagttcatttcatgtatttcccttatcttacaaataatgtatatagcagttgtacatcttacctttgtggaagccagtgaaataaaagattcaactcgaagttcggaaattcctgaagactgcttctgagcagccatctgagaatatgaatagcgtgatgtataaaacgtccaggctgacaatcaaacaactgatttacttcgtggtgagccaaatgtcattttttacatgaagtctcagaataaaaaattagataaaaagtaaaatgaatattgtgatcttagcaacattctcctttaaggggatgggaggaatgggaggaacagaataaaactttacgaagacctttttagttagaaatgagtcagttggttggatctttaatcttaaactttgggcaaatttgagtctcacttcagaccgaactaggcaaaacaaaactggtatctgagcttcatttttctgtaaaaatgttacggggatgttaggaagttaactgttcattaattaaataatgaacataatttatggggctcttactaccttgagctaaacaccatggagtgtaataatgactgaacctcagttgctgcctttaaagagtgtaggagactgacacgcatattcaaatatgtactaggagtgtgctcttgagctgagcagaaaagtggcaacttgcaggggtggggtgacagcttctgtgagggaaattctttgtgtactgcaaatgtccatgtgaggaaaagactgagaaacacactctatattctgcctagattgtcagcttgaccttcccttgtgtcttctgtgacctcctgagatcctttcacctccattctatcctggatcctttgcatctcttccagcatgaggacctcccattgatctgttttctgtagttccatgactgttggccatgcaagacaattaattaaagtatgggatactttactaggtcttaactgcattttgaaatcttggggactgaagtcccagaacgacaagaacataaaatcactgtgactctacctcctcatctcctccccttctctgtcctcgacttacacttccattgttctcagaggacttcccttccactacttcctcctgtaccaccgtcccttttcctttcagggctatttctcctttttgtgctccacttatctctgcttcttgatctctggggtggtaaatgttagtcttttggggcaattgatttggcattttaaatgaaagtagtggggagaggggaaaagattccacagtgaaattgtcttaatgtaagattcaaaccacaactgcagagaacatctgttttgaagtttgatgttgtctttgtaacccaagagaaaagcagagtaagatcagaggaaggccttagccttccaccaggatgaaaccacctgcagccttggacagtgggtgaaatcctgtagccctgggatgcagagcttctaggagactggctgtcctcttctctcatattattaaaggatgttggttctcttgccatctgtgctattgccattatccctctacctcctcaagagtccaattcaggacaatttaaattggaatcccaattacatgatccccaaaggctcacagagtagcctgcattctgcatttgcagcaattccaggcaacatgctcagcctgcttcagggaagcacacaacactgagtgtggatgagacctcagaaccctctaaccttgggcagctccttacctcttcctgtctgagccatgtttgatttgctgcaagaggaatacgtgtctaaactgctggattttaaaatgtcgcttggtctgtggattaggccaatccaccccacattgttggggctgcagatgcagttgaatggttcataattatagtctaaagaaactgcagacagcaatagagccaacccaggccctttctctcctgacagcccatgccaagctgtctcccacagggaaccatagtgtggttatcctgcaatgtatttgcccaaagacaatacatccagtgtagagaagttggatttctagaaattgagtctgctcatctatctactcccatgtccattgtatcctgtcttgtgtctcaagggtgtctggtacttctcctgccaaagtgaaatgcaaagtaaatgcaaggagatgccagggagagaactgctatcagggcatctggttctagtactgacactgacttttttagattgtgtggccctggaaataataatttcctcactcacactcatttttcacctctggtaaataggagtgctggacttggagagcactgataaactcccattgagctctaacatgtgacaaatccaagacctaaggttttgtctccaaagaggcactacaaatgtgatcttctttcagaatttaaactgtcacttttctgtgactcaaaacaaatataaatctagttctcttctccaatcaggtagttctcgaatttctcaagtgaggctgatgctgggcaggttgccagtttaagaactgaggaagggtcttgaagagatttttaaatgaaatgtggtgatagttgttctatctctcgctggagatcgttcaggaaaattgagcatccaagctattctgcaaagagatggctgtagacagacatttaatgtgatttcccacatattctaccgtatactagatcttaataacaataatcaaatactaattctcacctagacactgtgctaaattctttgcatacattatctcatttaatcattcaaatagccttaaaaggtgtgtgctgctattatccctagttgaaacatggaggaactgaggttcgggattgtttaaatgacttacctgtggcaattcagctggctagttggtagagtaagaatttgaacctgagtcttattccaaagcccacactactatcctctttgttttcttatattgagctttccagggcaaacaggctcccaagtcctcccctctcccccaaccccaccccaccctcccttcttccctcctgactgcagctcctcctaccctcattgtttattgtgccttctaaacaatagccaatgagtctgtgttccattctagggagagctagggctgattttattccctgaaacagagatgaggttgtgacacaaaaaggttaagtggctttggtgaggtcacagagccagcctgcagtcagcaacagtaccatctgagtcccctggcttgggtcccttaactgaccctaaggctttttggcatccaagtttaattaagagagttattttaattttccttcctatctctaattttccattttattgctgcttgataatgtagatattgaagtgccaggcatttttcttccctagtgtgacttttaatgactaaacttctcacatagaaaccacttgccttagaagtaagctttcaaagcttgtttctgtgtatgacagagactgttgccttttctcagagaaaaatgagaccacaaatgcagctcagacaggttgttgttaattgagggcttttttttttttttttttttttctaaatcttacatttataccagtaaatcaacatctgtgagtcataaactggttctggatcagccgttagtggtctgaatgtttttgtacctaccttcagtaaagcatattttagctcaaaactcagagattctttgttttgttgaagttcaagactcaggagtagataacatgctaggacacttctggagagggaaagtctgtcttccatgattgttcaacattaagtgtatatttatatttcttttttattgaagttggggtggagttgagggaggagtataaataaaaaagaaagtatgctttttacatactccatgtgcttgaggaattcctgtatgaaggtgactattttcttaatattattgtctagctccactcttctgttccccaactcctgcggacttttcttggcccttattgacttcacgttcctagtgtaaggcaattcagcacttggtaggatataattagccgaagtctaaggaatgcttaaaaatacaattctgttttttcccaaatgcaggaggaacagactgctgcagtacaagcacaagcacagaagtatttatttgattgatttttttttttcctgagtgccttaaaaaccagatatggtattgaagtatcttgcccaagtggatgaaaggcaacgcttggctgctgttgtttggctggtggggacactgaggcatacatgtaaccgagtggacgtgagtgctggggatagaggttctgctctactatgaagggaaaagggcacagcctctgacactttttagttcatcttcacaagccagagcatatcaaactcacttaatcattgaattaggaagcccatagtgaccaaaaagttgatagttcatcattcaacacatatttattgagctctgtaatgtcttaggcactaggctaggcatcaatgttttagcgtatgataacatagaaatatcatttaaagtccatatgaacatttagaaaaatctacttgtgtcctaaagagaatgaataaaaatttcatttatcaacattgattagattaatgaaacatgaccctggcagacctgatcagattattatatcttaaatatgtaaaaaatattttaacatgaccttattagtgctcttcatccaaatccagggttcgatgcataacttctgatggcataaatattcataattaatatcatctggaggtaactttcctggcagcctgtggtggcgcctggctatctctccaaactgctgctttacgcaaccctattccttgatttggacattcactcattttgtttctgtgcttcaggactggattaggaaacggatgattgactatctgagttgtcactatggaagaattagaaagaataattttcctcattgctagagtggaaagtgtttacagtttaatcatggtgggcttttttagtatctaatttgggtggatgttagcagcagtgtttaggctagtctggggaagaaagttgaggagcaaactggggaagagagaaaggagttgctctgaggaatctgcatttgaaaatagagaagtactcacacttggattaaaaaatgccaacattttctcaatacaacatcaacaaaacaaaattccccaaagcaactctagatttgttcacttcttctcctgatgaattcatagtgagtaaggcagaattgattcaagaacctttttttttttgtggttcatttggacgtgtaaatgtacaattcattcatcagctgtttctctaggcttttcccaggaccagaagggtctgttcttgtcatctggaggccagcattgttttctcataccttgtggaaacacagctggattgcaacagtctttgttctttcaaaaattaggactatcacatacaaatattttcctctggtcactaaggagggatttaatctggagtttagaccaggagccacagatttttctgttcctggcttcctccccgatttgctgtgggaaatctgcaaattactaaggcttcaagggcacaaaactgggattagatgaaggtaagcctgtgtgtcaaaacttaccagaggcagaggttacagttacagtcaaatgctgggagttcaaatgtgcttagaaatcaggaaacattaaaaatagctttctctgagattgctcaggaagatttatgtttaatctttctgttaatcaaagatggagctcagtgcctggttctagctatgtatttagatatatacatgtactggttgatttgttaattaggacaaactatctctattacaaccaatgtattagtggcaaaccatgaattattcgggttcattttgttttatctctagtgttgggggttcccaaatggaacagaaactgtgcattgtgattctgtcatggctgccaatgatgtactccagaaattcaaaaccacagagcctctgcatcacttttttggtggcggtcgtgggagggttgttagttttatctaaaagaggagagtctgtgaaaggaaagacaaagctttggccaatggtgacataattagaggaacagaataattagaaataaatcataacttccccttcaacccaaccactgctggaggtaaattggaagcttacggaagctcatggctgggttctagtttggggtcccgttctggactcccctgccaacgcaggagcattacatgggtgggctctgaaaaactgaagcctccttcagaaacacacgccctgactcaagatccggctggagtccaatactcctaaagccctttgaggacacgggctcacgaatcccctgcgcctgcctgcacgctcgccttcatccacatgcctcacgtcctgtgtgtcagtctttgtgaatgaatgatgtacacgcacttggaaaactatgctgctactgggagggggcgagagcgggtgaccaagccctcaagaatgcgtggagaatcagacggactttcccgaaacggtggaggcggcctgtgcacccagcctgcacacccgctcccggcccttcccgcccctgcctgggctccgaggcccggggctccacgcactgctcctccgcggtcgcggcccggccccgcgctcgccagcccttcctttcgctttgggccgcgggcggagattggccgcggtgctcggccccgcccccggctccccgccctgccccgacgccccgcccctcgctcccccaagcggacatcgcccggcccagggcgcgcggacccagcggccgagacgcggcgccgcgagaaacgccctaaagaggaggggagagcgcgggagggcgagagggagggagagcggccgggagatcgagagcgaacgaggcagccgccggcggagaggagggagcgggcgagggccgggcaggaggagcgggcgcggcgcgggcgaggctgggacccgagcgcgctcacttcgccgcaaagtgccaacttcccctggagtgccgggcgcgcaccgtccgggcgcgggggaaagaaaggcagcgggaatttgagatttttgggaagaaagtcggatttcccccgtccccttccccctgttactaatcctcattaaaaagaaaaacaacagtaactgcaaacttgctaccatcccgtacgtcccccactcctggcaccatgaaggcggccgtcgatctcaagccgactctcaccatcatcaagacggaaaaagtcgatctggagcttttcccctccccgggtgagtggcgacggccgaggcccccacccaagctctcggccagaggccgggggtcccctggacttcttccccctttcgccgttcccttctgggcggtgcatttcttcaggagcgggggatgctgttggcagctggatctggaggacgaggaggagaaggaggaggaggaggaggaggaggactgttggtggccctagacccttggtttggggggtggtatttattttcacagctgtgtttttgtgagtggtggggaaaagcttatagaatttccagcgccccattcctgctttttttattttcccaaatgagcgagaaccctctggccttattccttaatgttaaggggagatggacgctgcctcagaggacatcatcgcctgactccacgtcccccatagaactgaggctgggtggagggccccgggcagtctaacgggttggccttcaggcagattttcaaataaggtcttgcctccccaagcgtccctgtcacatgccttgcccctcttttctgggttgagggtaaggagatcggaggagaattgaaattatcctcttaactttgagaaacgtccgaccctattcatgtaggttacttactttacccatgtttctaatctgccataaatttttcttctggtaccaaaggtccgttggaaggaaagcatcaaacacccaaatgtgactttgtgtctttggtacatggtgttgtccaactctttcatttatatgcatttgaagaagagaaggataggaagtaattttttttttttttgtctttgacacaaatattggtgctaagcaacttaagagagtctggccttacagaatttctgaaacaaatgtagtttgagagggaaagatgctttcttttaggataaggcactgccagctatccttagagatgagtgattttggaggtgaaagtatatagaaagatctagggagaaggcagtgcaccctggaaaataattaatttcaagaacaggctcctctgttgtatctgattatcaataagtttagttgctgccccctgtggttaacacttctttgcctctgccataatttattgcttactttaaccctttcttacgctgcttaaactttcagcacaaccatactgatgttttgtcattctgaggtccttcagaaatattaataaagacatgtaggtcacgtcccctccctctgggtcccctgacattcagctccagggctgctgtgcacagaaggctgagattttgtctcctcgcaaggatgatggtggtgggagcaatgctgagagcgcagctggaaccatggagacatttaaggcacttaggcctacaattcagaaatgctgtttctatgatggttgtgtttgggggttcgaggaagctagaatgagttctgtttgtcagttgattgaaaccatatatagaagtgaaaagatagttcacatcaaagatataaactcaactaataggtcctttccttaagaacagcttgtttatatgtgttgttatgggtgtttatgggggaagagacagatttggtcatctgggaaatatcgtgtcgatatgtcagtccacatacctacaagggatctttcatcctgggaatgaaaaagagccctggcaacacatgtttcagatcacagtgaacagctgaggcaatttttttggtaatttaatattaaatattagagacaatgtatatggtgccgtcatttcagttactgattaaaaataagctctgggcaagtaactttctttagctttctattctgtaaaatgggaacaataaggcctaacgctacagtcagcgtccattataataagcatatttgcaatggctttctttttcaaaaaagatttccaagccattggtcatcttttgtatgtgaacttcgatacaacaaaatttcaactggccaaagaaattgggcagtcttctgccattcattgtaaagaggtttgatttctagcaccattatttattatcttggaaaaaataaagacaaaaacttgaaaaaatatatagactataatcaacttttttttttctggacctttagttgcttatatgcgaacattatgcccatacctcagagaggaaaatagagtcacaggaaaggtaaataattgacataaaaatatgtagtgagccagtggctgaagtacaatcaattcctgtttctaacttcgcaatgtatattgctttgagtaatgttgcaagataccttccaaaagctcagcaaagaaacctcagctgagacttaacttgcaggtgcaaagcaaggatgggagaaacggtgtttctggccagggctgtctgcttttgttagtggaaggacaagacattggctaagtgcggatttgccttgcccatcagaccatataggacatgtgtttaaagtttaacttctcacagcgtagctttttatccacagctgtgacttaaatatttgtcagaatgatttctttgggttgcttagtttcttatgtgtggagacagctagtgtgggatcttatctggcttaaatgattaaaccagaattttctccccaccccctcccaaattcatgagtgccaaagagaggcagtaagaaagtggggtgtccaaacaggagccgcaagacctggattatttgttttcctggctaggacctgaccaagaacctttatgcacttttattctattttgagacttcacaggagtttgacagcgttaagtgctaaattaacatatactctgaaataacagtagaattgacttttccttgcaagtgtaagagtaaggtgggatatgctatttgattgcaacagtgtgattgcaaggatcttaaatagcttaaaaacaaatatagccattgggttcactcctggttctctcctggtggagcctgctgtgaaggggccaggtgccaaagccaacacattcccaagccacttaatttttcctttccttcaacactctgctctaccttcttggtgaggtgagcttaatgtccagataagagcaggagctctaatcctggatacttgctgttctataagaataaaaggatcagcctctcaccccacccgccctcagcagagggtgtacatccatcgggaacatgcgttatacttagagataggaagaagctttgtccttgctcagcttggtcagtctttgtttcttcatcagtgtagacaagaaagaagggcagagctgcccagtctattagatcacttgctcactgtgctcccagatccccgccgaccatactccattagagactaaagagctctatggttcagagcagagactctggagccagcctgtctggatttgaatctcagctcggccacttagcagctgtgtgactttggacaaatgacttaatctctctgtgctccagcttctgcatctataaaatgagtacaatcattctacttcataggatgaatatcaggattaaatctatgaatatgtgcaaaatcttaaaacagtgcctgatccataataaatactatttagcagttaactacagagcaagtcaacaaaaaatgatcctgatcagtgtagaattttcagaggcccttgaatgtttgttagaagataaggtggctgtgttatgtacctcctgataatctattattttagagggaaagaagagtaaagttaaggaggaccttttcacctgcttagctgagatcccatgcccgtgaaacttcattctgttctccagggagcaaatagtgagaggtaactttcagagagtgtcttgaagtccagctctcactgttggaggcacagggagggggttgccagttactttgggtgatggagattgtcattgttacctcagagcaggaaggctaccaagtctagaggcaaggggaacatttgcagggttgatggaaaagtcaagttttcaattatgcagggctgagaaatgcatcatgtccagttattataaagcatctcctattttatttatttatttggttggcagagcttgcattcctggcatttttggttggtttgtgttgctgtttttttgtctgtgtaactttttttttctcttaaagaggccagaccaccctgtaggagcatcgcctccctccaggagacaaaccagctcgtggtcaacctcccggagcccaggtctctctgggctccatcaaatctctgcaaactgagagctggttagtgtaggtcaggatttttcaggagagtctccctgtttcagaatacagcagataactctgcaatggttacagtgacagtgtaattacagatgtctctctggtttgtgtaatgaataatccatggctgtggtggaattccatgagcttgcattgaaggtggtaggttcttgtcattcaaaagttgttgggatatttctgaagcacacatcgagcctgcattgtgtgctgggcacagccagataaaagagcacttttatgcttcacacttactctgaggtgtggtggaagtattattttctccatttttcagatgaggaaaatgagtttctgagagatgcatacttggcctaaggccacactctagaaatttagaaactgatgagatgttgtaggcattttatacctaaaattttgagttattctcaaaaactctggaaattagaacacaggcaggtgagaaggcaatgctggtcggtgctttgggggttcaggaggtacagtggctccctgctatctctgcaagagccccctgagctgaatcaggtggcctcattgttagctcagtgcttcatacggcttggggaaagggtccatcctgtgggttgtccccaggcctggcagtccagatgtgttgctttagaaagatgtttgaaagttccagcaatgcttacctcagaatgaaaggcagagaaccaggattcttgtttttgcaacgtcttccatatggccttggctctctcacaggtaggaaggtgattatgttcacctccaaggtcagtccttcgctgagcctccagattctgcccatttcttccccttcatcactgatgttgctgtgcattgaatctctcataatcaggatgatgagacatagcttggcaaactagttcattttcttaaggcagttaaaatttaattatcctgcttgcagagaggccatagatagttgagttgcatttgctgcctatgcctcatataaatttcgttttttcccctaaaatttagttttttttaaaaaagtccattccatgtgtcagggcacatggtctggagttgtcctggcacaagacagccccaggtgtctacctgcagacctgccagctgtcccagcccatggctcacacacaggcacactcccctgccacttgtttaaggttaaggcattggtttctttattactgcattatggggagcattttcccgaagagttagtatgcttgggcccacactgtcaccgcagagaggaatttgtatatgaacaacatcatctccgtgtttttatttagctgctccttaatgaaaaccttggctccattttcctgctcacaaggaacctctgatagcatttgcctctatgtttgcagtattctaggtctacccttcgctcacagctgttaagctgttcttaactcagggttaggaatgtcaaggctattcccaaatctatcatttttacttgtcatgtgtctctagctactttctgctttattttttctgtcgggttgatgatatctttttcaaaacttcagtggatgttttccaaattgcataaacaggctatttctacttggctgcttttctgaagccttcgcctatctgcacccccttttccttctgattgtataatgtataatctccatgcagatacagaaagacataggtctgcagggtggattgtggtaggtctggtttcattggcagagagccatgcttaacagacacgctcaaaatattgctattcaagccgtaaatattttattgatcacttggccaacgctgtcatatttcccaggtgctttccagtgtctactgcttgggtgcaagcctgtcacttgacacttcaaatgtggcttattactgccccttccacttttctcaattgttctttcttgtagcatttagtactgtctctaagagttgtggaatattgacccagatagtgcttttagacccaaagtaatattagaaattttaaggctgttggacttcagatcataatggtgtagagatagaaaatcgtataatttaccacccaaactgggatacctttgagagtgtaaaggggcactattaataattgcatcagaatgacagacattaactggggctctccccacagatgagggccacccgagttagacactaaatttggtcaatcgtactttctagaatatcttctctcaattgccaatttcagggtttagaccatctaagtaagctaataaggcacgattaagagtttgaagccctttaagtttagtatggttttcccccaaacatggattatattttaaatttgtttctcagtgtctgagaaacccaaatcaacctcagacaagttcacttcaagcatttgaaacctcttggtagctttgggtagctgtgataagccatttatttttgctttgcaaggttctgtggagaaactgtaaactctgcatgtagtgtgcacgcgcgcgtgtgtgtgtgtgtgtgtgtgacagagagataaaatgaactttgaagtagagggacgtgtcttcattacacaagtgaagacaattgcaatttttgttttgttttgtttaaatgtttatcgaagataagaaattttactttgggctgaaaaggggcaaaaaaaatgttgtgttttctttttgtaccattaaagtgggcaaaaacaaaagcaaaaataaaaaacaagccctcaattctttagaaggggaggaaaggaatggtggattcaattgcaaaattctttttgaattaaaaaaagacaagaataagaatgaggacaggaagagtaagaaagtatgaaagaatgaatgaaaggaaattgtaaaactaaagatgaacgaatttaagtgatattacatagattcttggaaaagctttcatctgggccaagcattacacctggttaggaattccaggctcaggtggccccatgggcagttttgggtctgttgtttctactccttgcctgtggtcatttctgaatactttaaatccctcatgggtagatgggtggtcaggacaactcagatgaagtcttccctgggttccaggtgcttccatggcaaaaaatgcaggaggaccagtgtttacatttatgaaaatatgtgtggatcaatgactgttggtattttctgtgtctgtgaagctctctcttgcaacagtgttaagttagtttcataggtcagcttcatgggaaacaggggcacttctgaagcatttgaaggaggtgtaagaacagggaaaggattattttccatatagagagcagcgtgggaagaatgctgcaagtttggaatgaaagagatgcttagataaacatgaaggaaaaaaaacttacttgtagaaagggatgaaggaaggaagtaggaggccaggacccaaagagcgttttgaacctcaggatgaattttgcctttgaaagtaggaatatttaagggtagagcagagttattgagtaagcttatgagataggtaactttttttttttggttacttttcctcctactcatactgttgttaaaacctctgtatcagtttatcagaataagcgttaaacctcagagaagatgacaaaatcaatcaggtacatattttcaaggtacaaatggaaaataacctcggtcaggcacaggaatctgctaagcctggtgagtgtttgtagatacgggttttttgaagtatctagggtctcccactatgtgccaggtgttatacctgttctcaattaattactttttttgtgtgcaattagagttgtgtgatgcgtttagagttgtgtgatgcattagtatcattcatgttcagaataaaaatgtgttgttgagtctgattttctttttcttttttgtagaaatgaggtctcgctatgttgcccaggctggtcttaaactcttggcttcaaacaatctttccaccttggcctcctaaaatgttgggattacgggcatgagccactgcccctgcccaagtctgattttgaaataccctttaagaaatttatcacaggaaattttcagtgaaagagtttccatgtaaccgacttttgtacttctagtacctacacatttctcctatttgatatcttttgccaaaaatttaagttaattccataccttatgcatcagttgtctcacatcattaagacacgaaataaatgcacagaatgcaatgaagaatcacagatgataaggaagaccttaccgtatttgttccttaccagtaggaataaatattgtgtatgaaataaacagcatccactctgtgaggagaatgtgggctggagagtcgggagtgttggtctccagccacagctctgcatcagtatctgtctgtgtgaccttaggcaagtcattgcatttttatgcacctcattttcttcatcagtcaaataaattcattggaatgacgacctgtcagatttctcctaacagtgacatcttatgactttaggtaacatttaaaacagccaaggcttggagagagtgtagactgccattcaagaggtaggcaacatggggatttgcatcctaatccccaaattctgttaataacaacttaatcattgaggaattttgggtgctttggtaaagggctacttccacagagaaacagagatgttagaaattgttgccagcctagctcaccattggggaaatggaggcatgttgtcttgggtagcactgaaccaagagtcataccttcctcatggtcttcctttcagcttcccttttccatgagccgttgctgcagttgcagcggaaggcagctccagtgcaggttctcacctggaggagggagatgtaagtcaagcattcagtaggtgaagcagctagtccagctgcttccgcaggccgagtctgtgggctgagtgatgagcttatttcatccaatctgcctcttcttgataggctgctctggtcagaaacagtccctcctgccttgagaatgcaatctgctgttagccacggcagtgcctcttcctgacaggcccagtaagtcagggccctggcctgctgtttgcacagagggaaaggccaggcctgcgtgctttgggtgcccacagaatggtgtctaggtggccaccggctgatccttcactggacacacgctgcttagcagagttggagccggacaagaaaccacctgccttggcttccccagccaccccggaagctacaaatgtactgggctgtggcggcggtggaagagcggtgcccgcacatgggggttatctgaagtctcatctgattgatgttatttctgcattttgagaaaggtctgtcgcagttacccttctctttccaaagcagggacctaagttcagcatgccagtttttgggggaaaaacaaggaaaacgatcattgatgacagtgtagagtttatctactggtgcttgtgtaagcacttctcatctccatccatcttttcttttttcctcatgttctgtttattttctgatagttattgggcgcaaactttgtgccagtatcctcattatttcgccccaatagtgaagcattattattgccatttcatagatgaagaaactgagattaaacgacttgcccaaggttgcaaagctgctgagtggaggagttcagattcaaacccagctgtagctaacttgaaaattccatgtctgttgttttcagaattctcagaaatatttgggtgtttgtggaatttgggggaaatactaaggtccgtttgtgcatattgtttgctagttcatcttaatacttggctatatctggtagcattttacagtttgccatgtgacttcaccacatttgagctcatggtaatccttagagttaccaatattttacaaataaggaaagtgcagtgcaccgatgccaagttaccctcccaaggttccagggcaaataagcggagagttagaacatgaagctccagtcagtttctccaaatcccctgacatttgagttcagccacatggattttaaacatttctttgattcgatgagtatctagtacattcacttaaatataataatgatgttattaataaacgttagcttgagatcaaagtgtcaacaaggcattcttttctcttttggtggaggtagatttcacccacatattttatgcatctataacaagtcccacatagctggctgattactgagctttgagcaggtagcactggtcactatgcacagattagtatgattactgagctttgagcagcttgaacagatcactatgatataggctctggaaaggttgtgcagatatgcctgatgccaaggcactggcaaaattgttggtaggctggcaagttagttccttctcaaggaaaaaaaagtgtgaatgatcctataggttactagacagacatgcagtttccctttggagaaggttgactttggactttgagaaatacatttttttttcttttaatctaaagagatttgaaaataatagatgtccaatttttgtttacctattctgaactataaggcacattgctttgttcttctgtgcctcagtttaccccttttagtaaaggaggtctattttaatcagtgagagcttcaggtagctggaggaatgcttcaggaaacacaaaacacaatgaaaaaattgttgaatcttaagctgcatgttgtggaaaagaactgtaccaaggaggcatacagagattaatgtcatcttagatgaacaattttttcaccctgctagtttccatttgggacatagggtgtttgctgtggtaccatgcatagacactcagagcttagcagagttatgtcagattatctctctaaaacaatgtgttgttccttaccaaaaaacgtaagcccctctggccggaccttattttggtcattatgggaggcagagcattccaaggtcaaatgacgggttttccatctgggaagtattcttttggttgctggtgtttccttgggagtggatgtaaaccttaagtagccagtagtgaccttgagtacctctggattactagggaaggggaggtagggatgggaagttgggcggtacacctgattatagcaagcatgaagataatagttttaagtttgctgttttgaatctgggcactaacttcaatgcttgccaggaaaatcttatcttgtaaagcaaatcctagtgaggtcacgaagtgtgtctcctcctccaattggggttcagcactatggcttggtgccctccatgtaccaatagttttgggtcaggcctaaggggtccttggtcttagctttgcccggtttgaatattttctctgctgttaactgggcagggtggcataggtggtcatcttattaccttctgttgcctgatgtgagaatcaggatacccaagtctggctttaccttaagccaccagatatggacacatgtctgcattatctttgtattcttctccaagaaggatgctcctagtgagtgagctgcctttctttgagagagagtgggaaagttaatgagttcacatttagaaagtactctggagtctttggtgattcaaggagtgttattaaattagtgggagatatgatacggagtggggatgctaaatacatatgagctccccaagggtgagtcatgtgtatgtgtacaggaaatgcatccttatttcatataagatcaagagttcaatcttacacctcccttgcctcctaatggaaaccaaacattcttcaaaactgctggatgcttgcttttctttacataactgcagttcagttggaggagtgagagaagtgaagctaatatttacagagagtacctactatgtgtcagatactttgcaatgtgctttacagaaatacataatcacattctttaaacaaccctttgaggttgatgccttaattcccattttgtagataagaaattgagtccagaattaagttcagataatttgcccaaagccatagagttttcaagtcataaatttgatcttagacctttctagttgccaaggccttcctacttagacagaatccatttggagagaaaactttctaacattcttctaagaggtcttgattcttggcacattcttctgtgtgatgtgttctctgtcaggcttgtcattataggggcaggaagaacgcactcatttcacttatacatatctaccattgggatgtgttagtagtgggaaagtaaaaaaaaaaaaaaaaaaaaaaaaaattttcacctgatttccatggtgcattttcaaatccaaagtagacacatgaaaggtggctagccaaatttactaaacttgtgtacagaattggtgctttggcccccactctccagattagacaattgaggaatgaagtgagagctccaccccagcttgagagttctccagggaggggatgttcagaggcacaagcctagggcttgaagctacttgatgcaagagggacatttgtagaaaagtaaacacacacacagaatgaatcagcatctccacggtggacataatgttaacctctgattcaattggagatttttaaaaataaagaatctatttctggatttctgaaggtctctcttgcagggagctttgtggcttttccatgccttccacccatcctcttctgtaatggatgatctgatgaaagaactttgaaatttcaggctgactgcaaagtctccaaaggatctggggtgctgggtgaaccgaacagcgatttagtttttttaatgagattgggccctgggtgacttgccgctggtttctcctggctttgatcaaaatatctgcctagtggcatggtgcaggcagagagtgatgagcaaagatgatgcaagtcttcagttgcccccgactgccttggttcgtaagaaaatattttcagtgtttttatgggcaaacaagttctaaggaagtaatacttgaatttccaaaagctggtgcagaatacacactaggctctgcctacacgagctagtcacaaatctctttacgaatcttctctaaattcctgttctagaggagcctaaatgaaattcgccttatttagtaattggttcttggttcttatatttgtcaggtggatttatttatgccacaggctttttaccatgatcttacgatacagagtttagataaaccctatttctctttgggtacctaagccctctaagacaaaggagagggatttacatttagggtgcttgatagtaagtaattgagtccctgaatcacacagcgtccctttcattatgttggttataatgatattcctcactggaggcagcaccatgtcttgaaagagcagagttttgaggtaagacagccctgggtttgaattcaggcttgatctttactaatttttccttagacaaattatttaacttctgtaaacctttcttttctgatccttacaaaggaggtaataataaagagctttcagggctgttaggattagagataattcctgtgaaaacttttatactttttcattgccacaggagctcaataaaccattatcttgtaggtcactaaattctgtacaaaagttcattgctgctgtcgctgttattacttcagcggttgttaaaactgtggttactattaacctggttacagaaaattttccacttgacacctccataaccaagtgggccagagccgtccctgtggccagttcaattattttcaaatgcctctcacgcattcttaccgaacgtgagttagggcttgagttatgattccaactctaaagcattatttttagacattgcccttgccacttcaacaaggcagttttttggaattgatgttatcaggatttaaaattattttaattgctgaagtactgtcctctttgccctggagtcttttcttttctgggaggtgacccagccattcaaggtttaggagaaaaactctgtacttgataatacagccaggcaggattagaactcctgttctcccaggcgtcatttcctgagctaggctgctgccgggaaggtccaggtcagtgaagacctggcagccccctgaagataataagattcaagacagaaaaagcccaccgacctttccttctttgccacagatgtccctcctgtccccagaaaatggccatcgcagttctagcaggcttcccctaaggaagatgtctgcaggaaccatgcacctctggggtttgctggttgctgattgcaatggttgatttatagccagaatctggcacctagaaaaggggatcctgcgtctttaaacagctgtgcgccactgtgtgtaaatgtgcttgctaatccagtgactaattcagtatattataaagcagcactgagccggctgccaaggcagggctgaatcccaactggagtggtgtgtaaggctcagagaattatgtcttgaattctgccacaccacccgtcgctgaaatctcatctggtgtgttccctgaaccagcgctggccttctggttcctgtctgcccactccgctccctctccttccctctccctccctccgtccctgcctttatttactcatggagggtggagcccggctcgatctgagtcagggccagggaaccaatcagaggtgctctggggcattccaggggccaaaattcatgatcccttttggaaaagaatttcccaaaaagatccctggcatcacagtgttgtgactgcaccttcctcagttcctgtgcagtgagccttcaccgcccccacaccccaccgccctatcagcttttcctctgtctcccccaccagggactggagggcgaaagagccctgtctgatggagacttcttccccttgagaatcttttgtatgtaagtataaagatgcacatatcactttaaaagagcactcggcagccttttctgggagcatctttagggtagggaacttgagggattttgttcgtctcctagaacctgtggcccttcctctttagtcctcacataagtggtcccagaaattgcagttaccaggtgtctgcctctggaaatggcccgtgcccagcctctcccacggtcggtctcccagtgagcatcgcggggcttccatctcacaaggatttccaggtggcggaggtggctgtgggagatctcatcctctcgtcttccctttcagtaatgccaccaactgccaggggcgccatcctggacaccttgcccgccttctgtccctcacgccctacacccaggacatcttacgtgcactccttcctaccccctcccctagtgcttctggaccccgctagttcactcactctgcattgcaaaaccttccgcttcagccgtgatcccagcactcatcgtctgttgtgagcatatagctattgcttctgtacttaggcggtgtttgcttctcccactagagggaaactctgcctgagggatctatcaccaaggtattcattgttgggctcatagcagtgggccagtagctctttctctctctaacatttacttttttttaaattgagatataattgatataacataaaatttaccatcttaaagtgtacatgtcagtgcattccagtacattcacagagttgtgccatcatcatcaacgtctaattccagaatgttttcatcactcccaaaagaagccccatgctcatgagcagtcagtagctctttctgaaaaaaagaatgctgtccagctgggatgtgaggagaagggctcgtattcctgatctggagcttggagcacacacctgggggagcgctgcatctccccaatctcaagggactttttcagtccctccttcctcaccactcaagcccagggtttattctgagggctcattggttaggctccactgtgtagtgagctagtgtcgtctggacagagataatgagcgctttcaccagctgcatgcagacagttcagtccggggagcttggggctgtggtggctgcaatttcctaatggcttcctgatgaggcagagccatttattagcagcggatgagggctgcacatcccagtctctccctttctcacctacccaggcagatggagagtggcttaagctccctccgccttttgcattgatcactttttgtctgctcgccacccattggttggtctcgcccattgatctggagattgggtctgcctggcgacttaccaccctcttgggcttgctactgggagaggcgtctgaggctgtctgccctgggtccgtgtgggcgagactctggggcagcagcaggaacaatagaatgctgaagattgggtgtttggggccattaaagagaagcccattgggaaggagaagaaaaaaatctgtggggtctagaagagatcacaatgaggtggatctttcctggaacccttaggtctctgcattccgactgcatttgccttcacaactagagctgcttgtgttacttcaggccatggcctttctgggggtcaacagatagcttcattaattagatagatcagattcaacttactggccagtgcccctgatattaagttctggctttgtcagtggggtttgttgtattccctcaaccctatcaccatggctcagtgaccctatttggaataccagcaggactagaagggtagtggtgtaaaacctttaaatgatatgaggcactctgcctttcagtgctttttagataaaggttcatagatcactgaagttaactgcagtcttcactctttctggattgacaggaatagcaccctcaaatttcagagccatcagacaccatggtatcatgctatcggagttgactgttgaaagttgcttaatatccctggtatgcaacaaggatctttgctaggaggaagcttttccaccttagagtctgaccattggtattccagacttataacctgaaataggagtggatagcatcatgaatctgtaaaatcccatcatatttattagatctttggatggctcattcctctgtgattcttaataacttggggaggagtagtgtttatccagaatgatgaaccaggacttgatagtagtgaagatataggagaaagcctctccctcccagtccactgttgtaagtaaacagcaatgatgtagaggaaaaaaaaatcctgagagggagccagagttctagaattagtaaccagtgacttaaggcaagttgatgtcaccttgagcttcattttacccaccagtaaaagaaaaggtttgaactagatgacatcgaaagcgtcttctaattctgtattccaggaatagtgtaagacccctgaccagtggcagagcttggctcctccttctctccacttttcatccattttataactatgtctggttgcaaggaaagagaacatccctccaaggagttgttaaagttttatagcaaattctgtaaattcctcttttctgctttttggtcctggataaggctttatgcatcctatagctatagtgagggcgggatagagggacagaggcagggaaatgtgtgaacacaccaggagaggactcgggctgatagttattgctccaggccataaaaaaggccaaagccaaagagatatagaggccaaaattatagattaggtaggtctacacaaaccttggagtaggctcgtatgataggtttagcagtgagcgtaatggtttagggagcataagcatgctcccttcaaagcttatctctctaggcccctcctttttagtgcaggaaacttgagctgggtccccacaattattgcctaaatccccgaagtctcaggatttctgactcctcattagggacatatatttagatttactgcactgtgtggggcctgaattccattagatgtgccatgttggggcggcaccatcggtttttggtgtgtttagctggcgtgctggtattttttggagcctgtgataggcagagggacggccatctcatgtgcttaccaacatgctcagggtggggatttctgcatcttctctgatgtcagccttgctttagggtaagaatgtgtgtctctctgccttctcctgactcctaccatgtggttcccatgtggctcttgtgaattacactgggatgattcagcagggcccttagagaagggaataattagtctgttgggagcaggggataggggaggagtcaaggaagcagtgtttgaatgaagtaccgtaccaggtcaggtgacctatagatcactcacttagatcttcacagtttggtctattttaggtggtccaatgtttcatctgaatttcagtctccaccatttgcatagcatgaaagatgtactagtatgtttgcttgttatgggcttgtgcacattatctgttgtcctggtagttcaagtttatgagcgcaccctccagatggtctggaccctgagcatcttgacacacttatgaagttgatgaagagcatgtggggctggggaaggaacgtgatgcatcccttttaaccatttcttggctcctagggttcgttggccctagcagtatccagcatgtgcctgctctgtgcttaaaattttaagttataaaacatttaactgtttgctactagttccctcccaatgggttgacattatctgggatgttgtctgtaaaatattttaagctatttaaaggaaaaagagaaaaaaaatcttatttagatttgtatatctccttacatgttggttttccaggaacaaggtgggaagttagtgacaggaacttgaggcatgagtggaaatctgaagttactgctcaggggatctctttgttgagccctgaatttcttgcctctgggagattccagctttgcacgtgggattcttaaggctataaggttggactggatccagagggtgcagttgcttactgttggttgcgcattaatgctaagggctgtcggtggaaactcacaatgaaggcatgcaggaggagatgcctgcaggggctcacggcctgtgcctccctccctgttccttcctccccagcccaggctctcctcatgttcagtttggtgtctgtcacaggctaatctactggtggctctttttagtaaggctgtaggaggattaaggatacaagtaacacagtttgggaaggattaaaattgagtatctctccaaagccatgttagagcaaaagatgaaattccagaaaatagagataccatcaaaaaggggctgaaataaagggaagaagagattgtccctgagatgtaatgcatacatatctgtgaatttcagctcttggcctctttatttgtctccaaagaaatgaggagggaactttcccagggaaaagctcctttatagtgctcctaaacatgtataattaacagacctaataagactgttgtttcagaaaccatagagttgacctccatcgattggttattttttccttggcgttcccaccttcctgcaacctctgtacagagaggccttaattgctttgggctgggcagagcagcagttacttttctcatctctcccttctcagcagtggctgtattttagcagaaggcaagcaagcttaagagaacctctaggctaagaagcaactatacgaagaaaaaagaagcccatttctaagcaggcagccttcttggtgacctcatcttcctcccaacttgggtccagttggagctgtgcatacagggcagacttccagttcctcctgtctgggactaacagtggcagatataaatagaccaagactttgtctgtagccattgttctctaactgcccattgtttctagaagcaaagcaatgctgtggctgcagctctctttctctctctctctctctctccaccccaccccctttctctgtctttctttatttcactgtacaggggtctgaattccagctcaaccatttgtactatcagccacctttcacttgccagatgcttagaaactcgaggggagaactggctccacaagtgggagaccaactgaatattgtaacctcatattttgattccagtaatgcttttgtctgagtctttccatgatatatttgtggtcaagacaaagatatgtggatctaatgatagtaaagtcaggaggatttgtaactggttgagcaactatacccaacgggtcttgattaatgtgtcagtgtcagagtaatgcatggtctctgatgttatgttatggggatcagtacttgctggttgccttttcaacatttttattaggggcttagaatagagaaagacacagaaagcacacttagtgcattgcagatggtgcaaagctgagaatgatggctaataggatgagcacagattcaaggtataaaaaagttcttagaaacatggatcgaaacaaagtgaagttaatatggataaatgtgaagccctgttgtgaagttaataaaattcagtcaataggtacagaactggttcagtatcactttctatggagaggtcctggcaatgtcctttgagtggcttttgtagttaggctgttagatcagtgttgtcttagtctgcaccagtcaaagcttatggagtaagatgatcatctcattgttcccatttaacttctgagaagcacgatgttcacctatgaatgcttgtgatgctcttcaggaacataggcttagaggaatgcttctaggtggagcgaggggagtggccaaaaaccatgccaacatgaatggttgaaggaaccacggagtttggaaacctggacggaagtgatgataggaggaagaaagcaggggaaaagctgccagataaggacaaatttgctttgtgctgctgatctctcaacaagcaaagcaagggcctattgatagaattcataagaaggcagatttaaactcgttgtgtctaatcatttttaaataatcattttggcttataagtgaaattgtgtagctcaaaaaggatggggcaaccaaatgtcttaagtgagaagacttctggggaagtatggtggtcgttcttcaggtcctgccctgcccctcatgaccactcatcatcaagtactcctctgtggatctggaagctggagcagggtgtgcacgcatactgtgttgcttcagtgcctgtggctgccaatattgagaatccttgtctgatgtactgggaaaatggacttgcgtattcttatttttcattgtggtttccctgggttgaaaacagacagttgcactgtgtgaatgtgtatgagtatgctttttccttctcagtccagatttatttattaaaagaaaaacacatctgcataaaaaagccttagaacgcaggaagaatgtccactttgtttttctttctgtagcaccgagacatgtggggtttcagcttcctctaagaagtttttgaagactggctttcatctcaaacaagactttttcccattggaaaaacggtccttttttggtttaaaaatgtatttatataatgtataaataaataagaaagttgagagagaatttcctttcaaaattgatgaaaaaatgttgctttctgaacatcattaattgggagtcggttgttgcctcttcccaggccattgccactctgcattctgtttctttgttctggtttacaattttccaatattccctttctctgcttcctgctttcttccctctctcctcccttcttggccagctctcctcctctgtctgatcccagctccagccttctcccttggcggctacccccatggccactgcaccaccttcctagcccccgttcctccttcctttctctaagcctttcttccttctgcccttcccgggctaactttgaacaactgaagccctcactggaagaggcctgtctctgtgtttgtttcctgcgtgggagggagaggcaggccttgagaaaacagttcaaaagtgcagaaaaactttacctcttccagcctaaataaacgggctctactccatttgtttgcccagatttttcatttgcccatggagaaaactcctcatcgtacaccttgcccagcctggccttcttggtgattctcagcaccactctcccgatgcctgttttaccccccgaccaagtgccaagtgggccccgagccgaggtttgaccaggccagttctgggtaggacgtgcaatggagcctgctgtcggtagagagtctcggggattgaggttcttccctgctacagaaagagctttttctagaatgaaaatgttggagaaaatgaaaaaagaaatgttatcatgccccatcatttttgcctcatttgcttttaattctgtgaataggtgcagggagaaaacacgtggcttgcgtgtctgaagatgtgggattgaatccttgttatatcactttactggtttgataatcttagttaagtcacttaagaaacatttgtgagcctcagtttcctcacctacatgataaagataataactacaagtgcttgttttgaaaaatcatatgagaatattcaagaaaatgctttctaaaagatacagttctagtcaaatagcaggaatgataattataggtgggagttaagtgaaattaaaataaattggttagcccaattcatcagcatctgcaagatctcagaggatgaggcctcaaaggctattatgtaaaccagaattagtggaagctgggattatagcaagatgtagttgtcagatattctccattgtcttcctggatggggttatcctatgtcatgttggtaccaaaagccgtatgatcctgtcatgagaattttagtgaaggcagggcaggagttttcctcattcagaagtgtaagatgtgggaagaaccaataggatgcaatgtggttctctgcaaagccatggagacgaaagagcccaactcattctttcctcctgagtaatgtagagaccatggctctgtgtttttcagataaagaagtcacactgttctgggacatttaggaactataaagtatgtcatgtggtgggagtcaggtgtaattatctatgcaggaaatgctttgaaacatgtgaagtactttgtaaatggcttgaaatgatcatttaagaagcttaaatgattctttaatgtaccctatggaggtggtccttgcacacaggaatcataatctcaatagctaaaacttccttttaaattgcttgagtgtcgttaatttagaggcccataaatgacaattaaaacgcagcttgggttttggcagattccaaacacatagaaaagagttcttagcataaaattatacttttgctttgtgccatattgattctaaagtggaactcttaggacgtttttgcaaccaaaaggcatcttaggtgcattggattcatgtagttctgaagtgtcacggcaaacatattttagatgcttattgctgcaaaaagtatttcccgttagcagattggaggatgcagaataggtaagaaattagtctattctgttagaaaaaaatgccagtttcaggggatgtcaatttccatttatatctcagaatctgatttttgcgtttgtttttcttattttctcagtcgcttatttgtacctggagaaattgccagattccttcttgatgtttctgtaagcattgggaaataaaatctttttttttaagtctttatattttataagatgcttttcagtataatcaagtagccaatgatttgttgagcacctactatgtcttaagctttggcattgtcacacatagtccacttaatcctcacagcatggtgggtagagcatcctagagaatgaaagcgagcttcatctgaggggctttgagacctggtttatgtaccttcacttgccaggctgctagagaaaaacacatatttaaaagcctttccagcaggacacattcattcatgtatttcctattttaggccatttgcccaatgtttagggtgggagatttgaactagtctaaggaatgagcgagaaaatttagctacaggaccaagggggcagttctgctttctggctgggatcctggaacggaagagcctctctgggtttccctgaacacctggaattgatttgggttttgctctgacttcgaaacatttgctgaggtggaggatggtggaggaggtaggaaagaaataaatccagtgattaaaaatagcttgtgcatgtcaggtgcctgaacgaatttgggaacatgcctgcaatcccttttgtctggcaggtctgaactccggcgctgccgaattacaactgctttcatttgtttttcctgcttccctaccatgtaatggtcaagggctcattggaaccatgtgtgagcctggtgagtcaccaaatcctcaggacttcagtggtaataatgtgttaaaactccttttgggggatggggcaggaggtggatgaagggaagagggagaagtctgaggtcacttcctacagatgttcagtgtgctgagccctctctacaggcttctttctcaggcctggctgcaggacctgaaaccagcttctccatgcaatttggagctgccttgcaggagaccatctcttttgtcttagggcagcttccctctggggagaggcatctcctctgagttggcacattgtacccaaagagcgtgctttccctagtgactgtgtgcattggcagcaaaccgagatactgtaacttgagactggcttgcatttttggtcagtcaggtcactggagggtgaattggggattttctctgcagcttcttctcccttctttgcagtggtttttactggctggtgacttcgaaagggttaggtattaaaagaagttcagaaacccagttgtatgtttcctaactcatatgagtctcttccaggtctcatagtgtcctgttgtttgggacaataatagacggtttggttgggatgggtggcctcagcatgggcactgagtcatttattgcttcactcttgctggagccaagagtcctgcgtgtcccccattgtgttgtcacatcattgggtttatgaaaatacagccgaggggctgaggagggacacttccctcccttctttgcattaaccttagccagaagctttgtggattatagtacctccctaagctggaagtcctgcctgcccggtttctagtgcctatcacaggaatcacttaccactcccttctactctacttcaaccctgcctttatatgaatgagagagggcaatagagactgtctttctttgagattcctttgcacattcttctgagatcattagcttttttatcaggagaatcctcttgtagaccagtgaccaccctccaggggtcatcaacttcagaagcagagccgtcagtgtggctgcagccatttctctatttgtgttggtctgaaggggtaaaggcaccttatctcctaaactgggacttgttgtcggcagtttggcaatgatattacctttcacactgcccttctgtgctggccagaactccgagcctttttatttgttttgtacactttagttacagttgtaagttcatgaggatgttgaccattaagaggaaatatcactgcagccttctgcttgtaggaaatggaagtccctggaactggcttaccatcttgatttgaaatcatctctgtgatccaacattggcactttccagatcatgacagtgttgctttgaaagaagttctgtggttcaagtgggccaatgcatgaaatatagacctagatttaagcatgagagaaagtaacttgaaggctttttttctttttccttgagtttatttgcctcttattgaactttaactctatgatctccctttatctaaaaaatatccttgtgacaatgaaatatttgtgggtgaaatgacttgttttctgggattaggtgtataattcttctgcgtgtgtgtatgggtgtgcatgtgtgtggaagatgaaataaaaacgggtagtattgataaattttgagtagagtttctctctacttttatgtatgtttgaaaattgccaaataaaaaatgtaaaactctatgagggatatagacaccacctatgaacagacctcttttcaaagtgaattgagtaagtgacttatccagtgtgtctacactaatggcgtatgtgaaatcagaacctatggattttgatcaacaagttatcaacaatgcacgcccctctctctcttttttctttgtctttagaatcctatctttcagtttggagaactgttcttttatcctctccatgtggaccagaaggtttattcttggtttacttttactttaaaaaatatatttcagtaagcctttatgtaacaaattaaacttctgttatatgcaaagttacccattaggttgagtcagggttggacagagaaggaagccaggttttcacttaactcatttgcttcatatggaaggaagcctcagttgcctgagtgccaggaaaagaaaagattatagttgattctgtaaatggctcttaattatgttcttacggggctagctgtatgaaaccctgggtttcttggaatagttttaagtttttaatcactcctaaaatctttcaaaataagaaaggaaaagtcccattttttttttctcagctctgaaaaatgttagttttcctggatatctgatccatttctgtttgcagtggaatagagagaaagaccctgaactttaagagttagaagactggcttctagccccagctggtccctcttggccttgtgactttaggtcaagctcttgatctcccagggccttgatttcctcatctgtgaaatggggaccttgtgatacctttccaggcccctccagttttatgtttagaggatattttggaatagtgtatgtgaagagtcttggcaaactgtaaagcatttctcaggtataaggcatattactcactcttagtatttctttcatgctgctattgagtgtgaccatacccaacacacatgactggtatcataatctgatggggttgggcccagttcaatggtcatgcaaaactgggacatgcaccttggatttcttgtccttggctgtatccctcatctcctaaccctaggatcccagacgctccagtcttcacatgatcattgattgagaatagtgagagcataaactcgtgaggtcagtaaggccagatgtcttgaacttcttgccaaacaaaagccacctagtgtttagattctgtgtaccattgttggtaagagccattcggtttcaaagaactgaaaagagtggtatgaaaagacacatgaaacaccctggaaggttcttggaaactgaacagcccttaactttgagttacatgtaagtgaatggaaacccttgttttacatttcacttgaaacatctatgaggtggttcagggttaggccacaatgaaaaatgagcagatgtttccctgcattcaaaatgccactagcttattcttctgtagattcagagaaagctacctgctcacttctgtctaaatactgtgcaatctcctgcaatggttatttaatcaccagcttctgcacaactgtcctttcagaggtctaggggaattcctataaatattaactgaaatttggggtcccaaggaataatcagtgggcaggaaatctaatataattgcaatatatttatgtcctcattttccagtgcgttgtgtttagaatctccactgtgttggcgtagtgtttctccaggccggattctcagcattttgaaacaaatacgttatttgaatttaagatattgtaattattagcacaaaggagatttcagtatttttccataaaatataattagttaatgtctatggaggtagtgattaactttcagacactgattctaaaattagaaatattttgtacctaatgtaaaaatattataataggtgatgaagtaaagtattttaagagtaaagcgatatctgcttaggctaagtcatgtcagatttttcacccgtgtaatgattttgtcattgtttttgatgagtatattgaacagaactgctacaatctgcaaacaacatgaagagaatttttgaattagtattttatatggtgagtttattttctatttaatatacatttttgagcatgattagtcatcacttaagagcaatgctcacacaaccgaaaaagacaatctttgccaactgttcacttagttatagaagggagtttgactttttttttctttttaaactacaattccacactttataggataaagttctgacttttacatctgaatcctttggctccaaagacaatgctgtgccttctctggagctgatcaagtccaaatgcaagtgtcctaagtggacagggatggtttcccccagctgggatgtgaaccctttttttaaagagatctagcacttgagtctcacagccagaggggcagagccaggcacctctgatggggccccaacagcacgtggactgggcttgtggagatggcattgaggtggaaaggcaaaagtaattctagctgctttcctgggagagaacaagtgagaacccagaagtgcctgccccctgacaggaagcagaaacctacgtggagaattgtcagctcagcagtcctgtccagaccacactgccagggcttgtgtagttatgggaggcagactcaaggaacttctttttcaggctttctgctgtcgtccttggctgtcacctcacactggcatcccactgtcccagctttcatgttgagaagattctgggggcctcctagtcagtctcattcttcagttcccgctacagcagaaccactgcttgtccatttggcctggcctgtgttttccacatgtgttgtcctggccaatttccgccatcagtaaggtccttttcatcaagtcataaatctaatggagggaacaaacacacacaacaaaacccacacagttcaagttaatgaatttgtgttggatgggggtgaagggaggaaagttgcttcaaatttggaaaaatttaattcactcaacatttgttgattgacttgtgtgtttagccatgtgctgggagctggggctgctacagttgtttcttctctcagaagcaatactctctggttaactagagagcccttttctctaaagtaaaactgatttctactctaagggaagacatttctggacctgccgcttagctgttcttggaggtgtagagtggggatggatggggagcagccatgtgtttcttagtgactcatttgatgattactccattgtttgaagggctggatgttatgtaatcaacattctatcccctcccccaattacttccccctaacaatctgggattttccatcattttgttaaccttcctggagacatgttgattttttccactagatttttttgggcatgtcccagggcaacccaaacttaccactccctggaacttcagattcctcgtcattggcaaggcctggaagagcagctagggagcccttctgttcttccagggcacagcctggactctagcagtttcctgacagcatcactaaaagcaaacaagagagaaagtgccacctgtccttcttttatgcagtgtaatctccacttagttcgacattcagaggcaatatatttgctcctttcttcagaggtttatcctatgcttaatttcattcagcccataacacattgtttgtgtccggggaatattttttaacgaagcaaagtttagaaatggccagttgaagaatttctgtagtagccttgcctggaacttagtcattttataagtcagtttcatgggatacactgaagattcaggtttctagaaatcactttggtaaagtgtatcactgtcaaaaggtaacaggaaagctagtagggattctcagctcatttctttgcttattcactttttgtgggaaactgtgcctgaggttaattcagaagatgtttacgttcagctgtatttatgtaccaacatcgtgaacatggtctgcaaatacaggaggatctggatggacatagcagagattaaggtgcatgtgggtgtggcaaatgatgatacatttgcaaatctgcaggctgtaatgcctcactcttcttcactactgacactaaccaagctttatagatttttcgtcctgtatgcacttcaagttgacttgaagtcatgttcacttatgttatctgccttgccacttttgtagtcaaagccaccatcctctctcaccaggactgatgcaataactttctaaaatgtcttgctcatccattcatactcacccctaaatcactctttacagaacggataaggtgatcttaaaacaaaatgatctttttgtagttgatgctgatgtccctgctctgaggactacactttgagaaccactgatctggagtattcttttcttcctaaattctcatgcatccttcacaattcaggtcaaacatctctcatcttctaagggaggcctttcctgtttccttcagacttccaggaattcctgttgcacattaacgttgcatcatgtacttctcctttgaagcccttattgacattgcatttgaacatttaactgtgtagatagatttttagtggctgaatctactgcaagaatcagatagctagctcctgtggagactatttctgtgttgctcactgttgtttctttaattccttgcacaaagcaagtgctagataatcatttgttgaatgaatgaatattgttatttcattttcataggtaactgaaagtatgtagtaacattaatattctcggtaaatgtgaaagataagcagggactgtgtataaactagtagaggtgttcaggaagagtaaacatatttgtttgtcagggatgcaggacattttagacctagcacaatgtggaaagccccttaaatgttgcctgctcatgctggcacagtggctcatgcctatgatcccagcactttgggaggccgaggcaggtggatcacttgaggtcaggagctcgagaccagcctggccaacatggtgaaaccctgtctctcctaaaaataaaaaaaactagctgggcatggtggcacatgcctataatcctagctactcaggaggctgaggcaggagaatcgcttgaacccaggaggcagaggttgtagtgagctgagatcacgccactgcactccagcctgggtgacagagcaagactccgtctcaaaaaaaaaaaaaaaaaaaaaattgcctgctctggtgctctggtgaggatgctagcacagttgtttctcagcttgccttcttacagcccatttgtaatgttttatgattggttcattacctatgtaatttttgttattcatatgcaattttttcatgcagatatggaatgtgcagatgtcccactattaactccaagcagcaaagaaatgatgtctcaagcattaaaagctactttcagtggtttcactaaagaacagcaacgactggggatcccaaaaggtatggttttgtagttggaaaaagagtggttggggtcagaccctttgggaagacacattttctcacctggagtgtgtgaggcagacgttacactaaccacattggagtcagcagctatgggccatggctgccatctgttaggacaatcatgacacacatactgaggctgccccgtctcctgggcttgttcttgccatcttggtatgaagacagtggtcctcaaacttgcctgcacactagaatcacttctggatctcttggaacagctctgatgttgggcattacacctgctgtcatctgaacttctaagtgtcattggtgggtgtagccaggttaaacctcaggtcatgtatgaagattgcatgttatcaatactacagtgctactcaagctatagcttatgataagtacagactttgcagagtatctggtataatacaggcacctaataatgttattaccaagtgccatttgaatgaatgactactactaattgctacaattgttaccactataattggctaagataaaaaataatcgagaataatagtctcaagtatattatagttaagagcagggagaggcatgagcaatctcttgttattattgctattaaagaagccatttgttctgttcagggctttaaaaaagtccaatgggaataaggcagtgagagaggagattcatggaaatctttgcctgcaaggacagagaatactcatgtggtactttttggctggcagtagtgacctcctagctggtgaaatagagaaggcggagatgttgaatatggaggggagggttatggaaggcactcaatgatgtgcaggctaggctgatgcttcctcattcgatgaataaagatagcattctcagctaaattcagctccttcagtgtcctctctgaggcttggataggagttaaaagcccgacctgctggatcttcatctgatctctttcctcagacccccggcagtggacagaaacccatgttcgggactgggtgatgtgggctgtgaatgaattcagcctgaaaggtgtagacttccagaagttctgtatgaatggagcagccctctgcgccctgggtaaagactgctttctcgagctggccccagactttgttggggacatcttatgggaacatctagagatcctgcagaaaggtaaatatgtggaaacagagagaggtggaggttatgtggggttgctgtgagagtaggtagggggctcacccaatggtgggacgtcaatgcctttatctgtgggtgtcctactgtaggacgtatgtgggaatgtgcctagtacactgctcagcatacagcaggtactcttagatgagtgtaatttctttttcttctacatattgggggttcagatattaatcttcagcaagattgtaccactgaagcttcttggattgcaacattctaatccaggtccttatctcaaacccatgccctggttgaacaagcagtgcccacagccaacccaagaatagtttttgtttttgtttttgtttttgttttctgcaatcttaatacacactgccttgatgcatgccccataatacctcatcacatcccgggaaagcttagcgtctgagaccgtattaataagacagatttctctgcccactaactgaattggaattgcagtagtgcatcataccttttacatctggagcaggaactggggttatatcaggacgctatgttgcaaccttataatgacatggcctcccctaacagcctcttccaacctttttggaccaagtgactcatgtaccacagtcctggctgagtatagaaacagcagcaggcggcaaacttgggtgtttttgtgcttatttttttgaattttttcttaaaataaattgcagttaccagcagtcagcagtgcccttcagctgactgtaagcctagaagcccattgccctctctaacccaggcccatcctttccctgtggtcatcagctctaacccttggcacagacgctgggggaggggagcaaaactcaggattagcacttttaccccgcattataccttcctttggttaagaatatattccattctgcagtgctcaagagagacccaaactagatttctctgtgctcaaaaatgttatctttattccttcttttcactttctgttgaaaaataagacataaaggaatacaggaaagaactaggtgagtctttctgtggctgcttttaccgaggatggcaggcagttgcaaagcaccggcatgttctccatgcacagacacccactcataggtgttgacatgagcgacctgtttatagagggaaacgatacggcaggctcctaacagatctgatttgactgttgacttctaaacacaatagcagattcaatcagactgtgtaacccagtatattctactaagaggctgttttcctccatttatcaaaatggagctgctaggtgttttgggctatctaagcccatctctgattgtagttacaattaatatctctatcatgtctccctgtttccaaagtgctttcaaatacattttctctttggattatcaaaataactgtgagatagtaaggacaagtcctattattgtccttgtctgtaaaatgaagctcagggtaggcgatttcttcagtatcactcatctccttttcttcattttatttcaactttcagtatatttttattttattttattttatttattttttgagacagagtcttgctctgtcacccaggctggagtgcagtcgcgcgatgtcggctcactgcaaccttcgcctcctaggttcaagcgattctcctgcctcaccctcctgagtagctgggactacaggcgcatgccaccatgcctagctaatttttgtatttttagtagagtcagggcttcaccgtgttggccaggatggtcttgatcccttgacctcgtgatctgcccaccttggcctcccaaaacactgggattacaggcgtgagccaccgcgcctgccctcaatatatttttatttaacttaaaatttaacatcccatcctgtgctttttgtataataatgtggattcacaggggccttctggccgctaagactggtttggcctcacttagggtaaaggaataatgtaagaaaatttaagagaattaggatataagtcagtatgtttgagagcaaaagtcatatcttcccacccaatattctgttgagagaggcagaaagaattctccctcttcaggttcagttacttgaagagatgagcatgatgtttgtgctgaggctacagcttttgttctgtaattaaagcaacacagcagcaaaagaacatagctgtttggggtggggtggaaggtgaaaggtacggggatgtttcaatctgataaactgctaaagcaaagtttaatcattttatctcaactgggaactgtttttctgtgcaggcataaacttgttttcccatcagactttgctcctaacaagctatcaaatacctgaggaaaaacccaaacccatactctatgtcagattcttatggtgaaatataatcagactactccatacaagaatcggagccatggcatttgttccagggtaattagaggatcccaggcttactgcagggtcgttcagagctttctgtccgcaggtgcacttcgtctcccttcctctccttttcctaggggagttggcatctgggcaggagcttgactgggttgctcttctctcccttgacacaagcgcagtcgcatttcaccaaatggagtcaccttaccagtgtcctgcttcttgtctgggcctgaacttgaaacctgagggcaatgggaaaaatacaaaacaaaaaccagacatctgttagaggaaatggagaacgtaaaatctatggcctaaagactgcaatatatttttgagaaattttgaaattgattagtttgggggttggggattgatcctgctaacctgggatgtactcaagcctttggctatagtgtggtcgacatacacgcagcacgaatgcattgagaatgaatgctgaatgccttctgagcccttagagattactcatggattctctttccaagatactaaatcccattttgcagctactgaaataataaccttagtcatatttttttgatctcatctttagacaaggccacagtcaggacagactcagataccaacccagttaatgagtatgcagatttcttagaaaaggggttgagatcattgtggtctttgcatccaagatccttttaggccaagcatgacttgaatattgacctctttgttccttccctatctgttcattacagaggatgtgaaaccatatcaagttaatggagtcaacccagcctatccagaatcccgctatacctcggattacttcattagtaagttcatttctacccctcttctctcatgataatagcaaactaggaaaagacccctatctcagtgaatctcaggctccttcatggtaattctatcaaaaataatatcttcttagatgtagactcttctttgttactttattttattattttccacaaagcacaaagtttcaacctatatatatgtttcattaacctaccaagttcctacacactaggatccttctctgatgtcttcacctgaaagtcatgcagagagactgcaactagacccctaaacttttgttcctatttgatactgtgcactacgatggccaaaagagggttgggttagggatttgatcttggtctttgttctttcctttttactagtggagataacagcatttcctccaaaatccttctttaagagtgtgctatgcagcttcaaattctattataggaaatacagtcttctcctttttcgtgtaagatacccaaccatactgaagagatggcctgagggaaacaatgaatgtaggcctgttgcactaatgtaagctctgagatataggaccatcttatctgatggctgtgcttttacagggaatatgaaacaggttttatttttttcgttttatctttttacgttattacaatttttattccagtgacacaatgatattaactactctgtgtcaagagcttattgtgtggggaatgttggtgggcatttgacctctatcctcatttcatcttcatcacagtgctccgggaaaaatcgcaatcacccccattttagagatgaggatatgaagtcaggaaatcaattaccttgtcaagggctaaagctgtttagtagtggacaaggttaaaaatgcaagcttttctgatttaaagtattttcccttattctctaaggagcttgtcccacatcatagggccctgtagatggtgaaaactgcttattttaggtacaaatctctcctctctttacttgcaaaccctttgtttccaggctatggtattgagcatgcccagtgtgttccaccatcggagttctcagagcccagcttcatcacagagtcctatcagacgctccatcccatcagctcggaagagctcctctccctcaagtatgagaatgactacccctcggtcattctccgagaccctctccagacagacaccttgcagaatgactactttgctatcaaacaagaagtcgtcaccccagacaacatgtgcatggggaggaccagtcgtggtaggtcatatttcttctctaaaagctcttgggtttacaagaattacctgactttgtgagtttttttcaggttccattttttttttcttatttattagacctgtagattcctcagtttcagccttcccatcttagagtgtccagatactaagaactttccatcgtggtgttttagccaagtccattattatgacaaaggccatggggtccacagtgaaatcaaaatcaggcaatctaagaaattaaatatcttacttgggcaaaatgttttactcaataactctagttgaatttggtcattttgaaaggtatgctctattttccttgaggaggacataatcaagtaaaaatggttcaagtggccaccctggaaaacccttaagcttagcatgtgtcctggtgctcctcccagaggactcctgggtctgactgtagatcctagctgggtacctggaatgacctctgctggccagcctgggatctttagcctcctgtgactttttcggtttgggaagatacaagatggttaaccaacggtttatttggaaccagtcatcagcagtgtggtgaagtgtgtatttagctagaggaccagggacggaggtggccaggggtttccaaaagaaggtagttttgttaacgtgactattataatagtgataaaatattcactgtcagggaagaaagtgtttaaaaatagagctgggtgacataaagcaaaaaaggtaaaatgcacccaatttttaggaacaggacataaacactcagaggtacagcctacctagtaaagtgtccagattgttttgtttctgagaaaaatgcaatctattgtaagaaagggtttgtctatttagcaagagctagatgatttctaaaaaggtgaaaaacctgacttttctggtgggtaaatgggaaagaattataaatgggaagaggaacaggagaaagctgatcaagcggggcttgggtcagatgtcaggctggggctggcctattagtgatttctgctcaatgactgaccatatgcggtgcctattgtgaggctcttggaggagagcccaatggtacctttactttgaagaatcatgggtcatgcccattgtcgtcttcttcgagtattcagactcacacttcctcctagcaggcctagggatcaccaacaagccctgcagagggaaagtccctgcaaaatcagaacccctaatcttccttcttaaggccccagggtgttagtgtttcagaccgaaggggatgggtgggaccagtcggccttcccctttctggctcttttttatttttgggtgcatgtctatttaaatacatacacacaagtgtgtgtacatgtgtttcttttttatcaggcgagtcaaagcattaaaacgactttcttccttgtgggactttctgtacatctacacagtgaggccaagcctgtgggtttgggctcagccatgttgtaactttgggtcgatctcctgtcacattgttttgaaattgcatctggctttgcatttgtgtaattgtctctttccctctccttttcttcattcttggttttggtccctaccacccctccaaccccaaactaatgactgtggaccaaaagtgacccttacaaggagacatgaggtatttctttctggctccactcttcttccctccctccaagttcaggccacagaaacttgaggggaagaccattttgtgcagggctgttttctgcatgttagaagtgctgcaaacagggcctatgcaaagggccaattgattctgagatgctgtgattggtctagaccgaaagcattactgttagctgattgttatttatactaaccatagtacagtattcacgggctgcattacagcgtacagagtgcttctatgccccacttatttgggccctaaggactgtctttgtacgagtctactcagtgggtggctgggtgctgccgcatcttctgttttgagtgctctgaggtctgtttggtggactcagatagctttggaaggagctcgccgaggcccttctcagaaaggctggctagtggacagtttagagaacacaggtttccctacatgagcgcagcagcataactgagtatctaatccagttggattctacccatttttggagaaaatacccgtaaatgaaggttcccagcaccagggttgtgaaatcgagctaaaatgaaagctgcctaccgctgtaaaccacaactctcaacagggttgcatttgcctcatgtttggggggttgccagagactggttctggcttggtttagtccccttgcttagtgggactccttggaaactctactatcttgcttgtgaaaattctgatgtcctttttctccaagtataaaattggctgatagaaatggaatcatttcagagagactttagcataaatactatcgacttggtgcggtgttgatgaaaatataaattctccttcttaggcttttggtatgtttgtctcaaagagaaaataagtgaccatgaagatcagtagctggtatgaacaaatacctttttatgagacgccacagaatttcctgttctgctaaaacaaggctttgacattctggttgtaggctgttttcttaaatcatttagtgtgaatttcttgaaagaaaattaaatgatctctaaaaaggtgaaaaagatgacttttctggtgggtaaatgggaaagaatttttaagaattataaagaaatatatattcatttttagtaagaatgaagaggtgcccttttgctagtggactgggtgggcagggctgataactccatgaagctcttcagtttgctttccagagattaccctcctctgaatggatgagtggaggaaggaatgagatgaaacggatgacaccacctttctgtttaaagcagttccagagggggtcaggatgtagagaaaacccacagcagtggattttacaaaaagtacacactcaaccgaatacattttatccggatctttaaacaatgttgggagcaacatattttcctatatatttaatttaggtttgggcatctgttcatgtttgatgtttattgttttaaccaatctccgctgtcatggagggaaaaatacactggaggcacactaatatgaagttgtataagtcagccttattctgggatttgaaatttatagatcaaccacccctgaacaattaagagttgacttacggatatttctccgtaaacatttgtcacatccctttgccttttggcctgtgctgaattgaggtgaccatctagtctcctatgatttaacttaggttacttgaaaagtatctgaaagttgcatataaaaaccattcctgcgagcctttttcgctcttagattcatttgttttcctccaaaactattttttttttttttttgctagcctcctttttagtggcatttttgccaatggaaatttctccaggagctattgtgcaatcatagcagctgtttataacctggtttgggaaattaatgaacttgcatgatcttgtggtcagttaagaatgccttaagcaactcacacagtaaaggatttctgacactgctgtggaccttaactctttaataaaccttttaaatattgcctacacttttccaatgaagtttaaatttcaagtacataattttacttggagaggataaagaatatggttttctgtttagaagagtgatagtgtgtgtgattttaaaaaatctcttgggaaaagcatcttacaccatcttactctatttgaaaaggcatagggtcagtacatgtatttcatattaaaatagtatttgggaaaaatgctaaaaaatagcacttagttccaaggtcaaaacaggctaatctgctcttagtctaatgggattcttttttcttatgaccaaaatgttttccaaactgggccttttgaagtcatctcattggcttgagctggagtggggaattcagcctgacattgctctgatttcttcatttattcattgggcctacgacatcagccagaaatcatatcataacatgtgtgatcctcagcttctagatttctggctttagaactcttgaggacccaaacgctactccgacagatgtgagcaacgtttgactctgaatctctgtacttggagttctcaaaccaggcagcagagtggccgtggaccctcggatggtggcctagtgcagcccctttcctcagagtaaacccatgacccctgaagcttctgttcccactcgcctctcccttcttccgtccttcctgcagatctgattagcaatctgtcctccataagagggtttttacagttttttttttttcccactccctcctccccctgtcctcttcctacctcctcctttacctccaggtaaactcgggggccaggactcttttgaaagcatagagagctacgatagttgtgatcgcctcacccagtcctggagcagccagtcatctttcaacagcctgcagcgtgttccctcctatgacagcttcgactcagaggactatccggctgccctgcccaaccacaagcccaagggcaccttcaaggactatgtgcgggaccgtgctgacctcaataaggacaagcctgtcattcctgctgctgccctagctggctacacaggtaggcgccctcccgctgcttaggccaactccatctgcacgtttctgtgggtggggtcctggaaggcactctgcacctctgaccagagacgacgagagactcccttttgcagggcacgggggagaagtctctctaagaattctttagtctctctccagccactctgcttgtgaatagccattgatttttggaagcaaatagtatcattctcttcaaagggatcatttccaagaatggtaggaaacttacattttgggtgtttttccatgtctgggggaagggaactataatgatctggtgttcctggaaactctatctagtggcctggcatcaggggatttttcctggtctgctcttgggaggtctttctaaatacaaaatcagcagcagcatctctcaaaggcacaactgaatggcctccgcactggactcttctgcagcacggttctccttaggccagctgttcaaatgtgggaacagtatcctcagtggcactacgccctgtccagatccatcctggcctatagagaatgccccttctcttactcggctttattatcagttttcttccaggagcgaaagctatagttatgatagtgatgggtgaagaaaggccatagagaaaggaagatgtaggttgagagcttgaactttgattgagactctggtagtagagcaaaacaatgctttcttcaaatgggttgtagcatatcatgctacttaaccagaaaaacatgtggagagtatatctgagaaatagccaaggagcattaatgtgttaatcatcagatctctctgtaagattgtagtgttttctaaaaattagaaagtgtgttgtgagtagagcttattttaaagtagctttgattactcagatgtggtctaggcctttattctcttataattctctccaccctggatatgttttcatgtagggaccctttgtgtggatgatgacaaacagcaagatctgtgtttctattgaggtgtctctctgatccttagagtatgctgaatccttatttttgcattcagggaagccttaggtcttttatgaagaaaaccagtgacctttgagaacaactcaaatgcttgaaaacttactcctccttcaaagatcaggagtatctctcttatattgcattccatgtagctcctagtgcagttcattgcatgagtagtgctcaggaattatgtctacatgttggagtagcaacaaggtcaaggccaggaatggaacttaaaggtccttactttattctttctacaataccctggtggtctttgcttgaacatggctagcatgtaggaacttagtacttttcaagggagtcctttcccatctttgaaaggagattattaggaagtatatccatttccattaaaaacgtctgggatgaggaaaagtgtattaagtcactctcaggaagtacaagagtgccagctcatgcagttatacctgttaggggttaaagaactagactgcagttgaatatagtgataaaggaagggagatgtgctgcttaattgggaagagaaaggaaaggcagaggtagctctaaaatgactttgtggccttgggaggtagacattatctctaattggcagtgcttgcttctgtttttgtggtgcagagaaaactatgctctaggtctgagttatgtttggatagattgatagttgcctgcccaccctctcttctgcccttccttccttccttccttccttccttcctccctccctctctccctccctacctcctttccttctttccttcccctccctcccttcctccctccctcccttcctccctccctcccttccttcctccttccttcctccttccttcctccttccttccttccttctttccttccctccttccctccctctctccctccctccttcctcccttcctccctcctttccttcttttctctctctctttcttcagaaatgggataagggagtaaaacatttagtgagtagaagagaaggggtggtgattatctcttaaaagtctcaaagtctgaagtaatcattttaatgaaaaaacatttttgaagcctcttaccatttaattctttctccttgacaattgcaatttcacttttcatactatctcatgtgatggcgagaataatagtccagaaaacagaagtcctctgtgtttcctcccaactctaacacactgtgtggttttaggcaaatttaccttgtacccttttctacttttagtgaagtagaagtgttcattcttatcttggtggcaggaaatctgtgaaagtgtaattgaattaaatcaactaattaaataaatgaatgctagacattgtgctagacatagagaaaaaaaccctcaattataacaattcaattatttcagcaaatgtttgagcgcatattgagtgcagaaaagcgagtatgtgggctcactgtctccttggattcaagatattttaaatatccttagacttgaactggattctcctattgttgtggtctgaatgaaagttgggatttgttaggtatgtgaggagcagcccacattttagtatttattttttccctgtaattgatacctggtgaacacctcctgcctgtactgcagactcaccctctgagggtgatctcacaccctcatggtgcccccgccaacctcatttaagatgcgtcctagggaatagggaagcggatgaaatgtgcccatacagcctcacccaccacctgaggcagtcactagagtgcctataaatggctgtctagctttatgcagacatgttaagatgagctgaaatttgcaaaagtactttggaaagcagaaatcattgtatagacttgttggcaatacattttattgcttgtaaaagtcacactcaccttctcaggttctgctcaacttttctgtctgttcccttaaaatttgattgctccagagtatgtttggccacacagtaggggtacacatagctctatgtcactattacttggcctgaactaaagggtgcatgcttagattctccaagctgggaagagaatccatctccctgccatttcaccaggagtctgggtctttgtccctatcacgtccaaaggaatacattttacttcttgataggatgtctttcttactgcactgtaagtgcggaagccagttagaaactgaattttcacattctcctgcacagttacattcttcctccaaagataagaaaattgcatcaaccttcactgggctcccatagcaacttgttaaatgaggtcaagatgcgggggcagataacgtggcttgaaagcctgcctgttagctgagttaagaatacatcaaatgcaatgttggcttccgccaaaatgtaccttcttaccttactgtgaactgtttacggttatcaaactgataccatcagaaagctccattttcttttgttcgaagatacattatgaaccccttctaattacaacacagtcctagagaagtagcccaatgctttctatatacattttatagacctaagcaaaacgctttccaagtccttgaaaaacataggcatctcttcttcctcttgcttctccatttcagtaggtatagaataatataatgggttgtcacatagtagtctctcttcctctcaacccctctagtcccatttcatagatgatgaaactgaggcacaaaaaaatgacttattcaaggccatgtatgtaattgcattctgcacagaggtagcttctgaattgaatcttaagcaccaaatgtctcacctgaatagaaaatcttttcttcatattagataatgagagtactccttggttattgcagttgcctgcctagactgattaggaccttatctccctcttgtcactaatgaacactatatgcatgtgggttaggggtatgtgggagggaagagagctggccttggcttccgtccagaattattgacctataaatcacctttattgaacttcattccagattgtcagacatagccacagataaggagtcctatcacttctgcagctgttgttgagcaggtctggtggtaatgcccttatcaatgtctaggtgtgttctcactctttgatttgcatttatgaatgaagtgattttcttgttttctaggagcctgaaaaaggctaaacccaaagccattcactaactgtaatgaaattatgttttatggtgttatgcagatttataagtaggcagtccttcagtttccttaaggctaaatttgggactatctggaattcaacttccaaatttttttgtgtgtgtgagacatcacacacacacacacacacacaaaggtactagtcttgcaggaaaagaagccccgggccgggtgcggtggctcacgcctgtaatcccagcactttgggaggcagaggcaggcagatcatgaggtcaggagatcgagaccatcctggctaacacagtgaaaccccgtctctactaaaaatacaaaaaactagctgggcgtggtggtgggcgcctgtagtcccagccacttggtaggctgaggcaggagaatgctgtgaacccaggaggcggagcttgcagtgagccgagatcgcacactccagcctgggtgacagagcgagactccgtctcaaaaaaaaaaaaaaaaaaagccctgtgcattctcctctaggtcctctcaagttgattctgccctgaaataaatcctcttcttgtcatttcatagatgactctagagccagtctaaagtcacacaataagaaagtcccagggccaagtccagaaccttagagttctggctcgtagttgagttttagggatcagtaacccaaaactactgctaaaacatgtttttgaaaataaacaactttactgcaaaaggaagtgcttcaaagcccttcagttcagaatgaaacctgagatttggcagcattagctgaaatcacagttttctgaaggaaggctcgattgcaaaataatctcaatgtattcaggtacaaacaacaactgaggaaacttttggtatgagcctaagttagtgataaggaaagagtaaaagcaggttactagtgcagtgtgaatttgtgctgtgggcatgtgattaggaacagcgtagagccttttaatttggggagataacaggagcgaagctctggaatctaaagtctctccatgtaaatgctgttgtgtaagacagtgtgaattggctaaagtcaggcccagagaagttagggcatttcactgaggtctgcaggccaggcaaagctggggctggcttccaggcttgctgaagccatcacagtctcaatgtagaccatccttgggcagtacctgattggataagaggaaaagagcttgggaatgagaagggcagaaacagagtgtcttccctttcttgctcagaggctgttgtgattaactagttgcaggaagctggcagccccctcagcttaaatagagccttcctgtcagccagcagctgagatgctggcagggattccattcacggtgctgggtttagcagtggatcctaaaggggtgcctggcgtggacctggggatctcagtggagtaatagactcacatgctgctcagttatgtgattgacgggaaaatactttggagcactgaggaggaaaattcccgggaagatttgaactggttgggaggcaaagctcttttctattgcctgtgagtaattccactgtttctgcctcctatctaattagttttgtatgaatttttcttaatcatctgctaccagtagaaaaagatcacatggtaaaaagattcgtcctcactatgaacttttttttttctaaatgtcttttaaaaaacgtggaaagtggtgattgcctatttctgtcatggctttcaaagaccacaactggctgaagcatcttagtgtcttgattcagctgcggtaataccttgcaagcagtctttggacagaagggatctattcatactgtacaatacatcctgcaccctggtgctgtttacaactctctgaggtcttgagggtgcctggattttggataccaggagactcacgggttgacccctctattctgggtatagcccactgcctgttttagaggaagagtctctgagtcttagatttttggggtcactgtttctttaataaagtctcactacaaataatggaattgggtggtgactgttctggaattccactctgtctccagtttgaagctccacctttggaggaagcaaaatgtttccactgagcagaatgcagccagcgtgctgctgagacatccacaccagtctttattgcctttaaacaacaggcctcggaaactccccatcacctctgttgggaaaggccctgccaggtgtcccagatgaccctgcctttgcccccttggcacttctttcttttctctggacggcctcccctgctgcagagagtgagcagctgctgctctttgtagaggctcattcaagagaagcgctgcccttcctgtctccctaaggtgacttgcatgtgatgcctgcaggttggagcactcatcagcaccccatcagtcacttggggatgcctgcaggtagagaagtccaagttaaacacaagaaagagtggtcatcccatgcagttttaccaagggcaacattcaggggccatccctgtagaattgagagcatggagtcaggccctgccagtgagcagctgtgtaacctttggcaagctaacatctctgtatctgttttctcatctgcaaatggcagtaataatagtttctataccataggcttgttgtgagaactaatgaattagtttatggagagcacttggagcagtgctgggtatacaggaagctaggctctaagtgctagctgtcacctacattccatagtattctccaaaccttttatttttccagtataattctaagttccttgaggccagggaacaacgcattttacttatagaattgcagtaattgctggcagtgtcatggggcgtagcaggcatttaataataattaggtcttttcaattatttagctcaatcccagatgtattaagttcctactgtgtgcttagactccttcatatacactgactttttaaatccttcaccaaatatcacatgaggaagtttctgttatgcccattgtataaatgagggaatcgagacttttttttttctttttagaggaggaggtctagcccaatgttacacagcaaacaacaaataagatgactttcagggttttcacatgtcagaaaatattcaaaatactgtgttagtttgagtgtgccggaaagcaggtgccaagacatgattagatgtgcaagatgtttacggaaggagcatctatgaaggaaaaaaaggcagcgaagagaaggcagcggaaccttcagaccatgctgcaggtctggaaggaggagatttgggtagaaagagccctcaactgcagctccattctaagaaaactttggctgggcccaggggatctttgggtcaaggtcgtctgctggaggagctctgtgtctcacaggggtggacctgcatgccctcactgtgctcagtccctggctggagcagtccccaggatgaggggtgctggtgtggacatggtagagccagtcaattatgttccctgaagcaggagaactgagtagaacaggtagtgtgacagctgcagggacctgagctgtaaacatggcttgttgagaccagcacagcttttccatgtggcaggactcaagaccatgtgtcccgacactctcagtagtccgtgatgggcttctgagttcaatgcatgttgttgactgtaactccccaaactttattgtcttttgtatgactcacctctccctgagagataatgagagtgaaagttctcctagagtgattgaatgtgaaagtttaaactctgaaacaaggatgggacttgctttgttggagatgctcacagggcacaggtctgtggaggtgtttgacattcagagctgaggcggtggagtttcttatggaggcctctcaaggctaggttctctgttctttttttctttaaaggcgtaggtaggacactttcagcttatcacgttatggtgaaacaaaaagtacttgttccgctacctccatgcagttgttaatattgtgttttgctattcaacacactctggctacgtttgaggagtgttcagagattatatgctggataaatgcttacaaaattcggtgtgcaaatgatcacttaggatctagttcaactaccttccaaggattctattatacctaactagtgatttctctcattgttgacatgcagggaaaacttaacccctaggataaaataaattccagagagcaagttgagaatcctactgagaaaagactataatcttcagacttctaaagtcctgttttctaaccctgatcagtgaacatatctttctttcttctcattacctacacacttaggaagatttttctttgtacatttatagtggctggaaaaaccttttctttggtttataacaaaattcttatccccttcccccaaatccaaacctaacccatctctggtgacttcttaaaagaaccggttacctagaagacatcaggaggaaagagctataaagaaacccacttcctgacttgagcttcactggctcactgtccaagtttgtgtctgagtgttagcttgaatgtgttagacagagttactgatgggtttagaagaaagaggtggttgcatttgaatagagactgcccctttaagagaggaacagtcccctttctcctgctgccgcccccacacatgtgtacttgagcacttgcaggtgtgcagagccagagcaaaaacaaaggtctttccctcataccctaaaaatgtgtaactgtcttgttctcagacccaagtcagactggccaaataagcctcacttaaccctgttccaggtgggaggactccactggccagttgccagccacctggtcttgctgtcaagcctgtcttgggccctgatggctggacaagaggttctgcttgaaccccagttaatgctggtgggacccgtctctttgggcccaaactattggcatttgtggggaacggtgttgaacttgctctaggtgagctctatacaatacttaggtgaagaatacttggtgagggacatgaataactaaggaaaaaggtgcatcgggaaaagaggatctaagtccatctgtggccaagatttccctaaaccatatatgcctgtgatactttcacttgcaaagcagtttgcatctgctgtctcttttggtgcgtgtgcacttttaacatgggaacaaggatttcagagtcttccctaacttaaaaaagtcctaaatgcttattctcattgaaaatattaaaaatttttacattcgtatactgtaacttttttttccttaacctccaactttctactttttcaaagttgccatacgaaggccaatttaatccttggaagtctaattagattttttctagtgcttttacaattttttttaaatgcatcttttttcttgttttttactgaaaattgtttttaaaaatatattttctgttgtttcattcttctttgtaattccattattgtatattcagttgctcctaaattgttcacctctttaagtgtctttctctctctctgtctatatatatgtatatatgcagatttttgtaataaggacttaatttacatttttataaactaaagagaagcagagattactatttccattttaggaaaggaaaaagtaaagcccagagagattaaatgagttgcataagattgcatatggtgattcaggtaagaactgatatcaaagcctcgtaccctcaactccctacccggggctttcccacaggcatcatatattttaattttataggatgccgtcatcactcagtactccactgcctgacatgtaaaatggcttttatttttaaattttttgacactcctcctcctttcgtttttgatctaacatgcaagagacatgaactcggcagtcaaagactggttttaactgatttgagagctgttttctcactctttttcatggttagatactggctatctcagcaacaaatacaagtttataaagttgttgtttgttcatcatcgtgttcagcaagtatgctttccaaacacctgtcagaatgttctttgttgtttgagttgaattattggaagttatattcccaatcactgcccttgagttattagccactgatacaggaacacgtttatagaatatactgacacagagtgagtctttaaaccacggccgtattggccagttatagaatgttatacatggagtgtgttagagatgagataagattgggtcagggtggggcaaagaaaatatacaactcagaagaaatgagagacatagaactcagccaaaatatcaagcactcctggcccttaatcttcttaaaataattttctcagggtcttgattgccagtcagtccagcaatacagtttcttgagttattcatcctcaggcaacaagactttgtgcagcttcaggttgagcttggtccagaggccaagaaactgtcaggatgttttctgttttgtccttaaacttaatggaaatcaggagatttaggggcctttgtgaatggtgatttagaagagggttgacagaaaggggtgatgcttggactggggagtcacccaccccaccctcagaggtgcgtcctcctgtggtagcatgaaaggcagattgatacacttgtgaacagatgggtcatttctggattcgaatgttctgtttttgccatcatcgtttggctgtgggtagagacacctggctggaagggaggggccagcaggcctgttcctctgttttagggccacctgccagatgtgtgctatcagggcagagtcagccctattgcaagggtgaccaaccatgagagtttcataggttaaaataaatgtggtgtcctgcccacaccgaggtatttgatttgacttttagaatagagctaaagggattagcttcttaaagtagcaaattaactcccaaaggacaggtagtcattttcatttttgggaacacgttgatgaaatgcagcctgagggtcacccatattgtttggccccaaatattgtttaatagagagaagccatttgagcggactttctaatccatatgcctttcttcagaggaggtttgtttcagtaatgtaatttagaaaatatttaatgagtacctgctgaagacaagctatcatacctggcattgaggatatatggctcagtaagatatagtctgtgttctcagggagaacatgtcaaatgacacagtcattcaacagcaaagaattttttgtttgttggtgtttgttggtgaggcactgtgctaggctttgggttgaagcagtgaaaaaacaaagtccttgtccttacagcatatattctagtgatgggagaaatggacagagaccaaaccaatggggtggtcttggtgtaagccatgtactatggaaatatgaggagactgcctgggaaggtgcctgcccagcgttgacctccttctgtttggaagaaaactcctgtgttctcctctcagcagagcacaggtgacaagagtgagaacttgtggttgaaatggaaatgaggaaggagtagaaggaaaaagtgaagttcaacctgaccctgttcacttgctgtgaggatgtccttgtcacaggcaggcaactcccagatctggaaaatgagaagaatgatactgacaaatcgggaaatggaagggatttccatcaagagcatgttactaacaccttgtcctagcccattgctatatatgtatttatgctgctcagttctcagcctcagggcaagggaccagaatagcaggggatttttaataaccagctcctcattgagacagatagtgggccttgcagctcccagacaaggaaatatgacccaaatgagcagtaatttacttgaagctttactttttttaaaaagtgagattgttgccttagatttgaggagccttgggggtccccttagggggtgaacatccttggtgtgatttgctttgtaggcttgggagctctccaagttcctacctggtatttcttcttcagagcttgtagcacgttcttcaaatcagacctgtcagtgtgtagtaagaactgtcctcttctccagaggctgagaagaacaaagcagtagaaggaaattcccctgcagccgcctgagagggagggtggagagggagcagacagcagggggtgtggaggctccgtgccatgggagatgggtgtgtggagtgtgtgtgtggtgctctcccgcccgcatggctctggaaagagacctccttctaacagggacccctctgttgttgtggctcagagcttcgacttgagaagcatactttcccagtgatgccactggattcctgatgtgtgacactcccgggcagcatcgtgaagggtgctgttgactgccttggagatcccagacagggacaccattatgagtcacattgaacatgtgagctccccttcccatgactggcgctattattagtaccgttttctgctctaggggacaaaggtcactgagaccacagtccatttgggtaggtggaagaggctgggcacagggataagggggagttgcagggggaatggaggaagaggctttacaagtttaggatatgttggagcaagggcaagggatggggtcctggagccctgtggatttgggcagacctccgctaagcacacagaaacaccctctagaagagtcgtaactgggagtgctggactcattcattgtctgcaccaatcttgggtgtgagaacttctgatgggcctggatgtgggtgtcgctggtggatctgtgtagccagtgtgccttccaaccccagagctgcctctaagctttgggtttccaagtggccctgaagtcccctcccagacctgaagtgagggtgatgcattgctgtggagacaggctcctgtattagaccatccacgggcccagccaggaactgcgcccaccctggcccagtgtttctggctggaagaacatttccatgtctttcctagttctcttgctccccacaacaaaaaggcagtttaggagtcagcaaaaaggtgctagaggggacgcttcagcggccatcatgaactcctctcacttggtacaaaaatgtgggctttctgaagggtgagccctgtgtgcaccagttaggctggagtgcgcctgtggggtttctctacaggaatcgggggagggagccaggaactgacatctctgttatgttgactgtcctattatgaagccaacgggagagatttcttcccattcatattcccattatttctttaggtatctgcttttcctatctatcctccctctttccttgggtgtaaacagaaaaaaaaaagagttagagagctctgcacctaggacttgggcttctagggcctgaatttaatttttttttctttcattccttttgaacaaaggaaaagtcacaatgaggacaaaagtcctctgacgagtactcaccctgtcccagactcaccgggtcccgtatgctgacatcacagagaaagggcagggcagggcatctacagcctatgactgcttgacatttcagtttggaaaatgcactggtagaaaaggaaaactaaccattccgtcagagggttcgtcctctgggagctggtgcaaaccacgggaattgaaggtcccttctctgcattgtggctgccaagtcccaagggcaggagactgcagtgtgctcctgggccctgttctccagcaccagcagatgtgctgacagctccctgccaaagactcatccgggggaaggatctcgatcttcccatccctttcctcggcttggtgtcatgagaccccgtgccccaaagagattttcagatagtgggagagaggttcaaaggtgaacattgggaaggagaaacaatgaagtaatgtaacataatggctaccacaagaggatgctggaaatatctcctgtggaggtggatgccatggcggggcctggcacggccactggtggtcggatgactgggagaaccactggctatcccgtgtcctgcaactgctgtgagaagtaggggagagagtttttcaagtcaggtccccttatcccttggaacattgcactcagtcaggcagtttagatgccaggcctttggcctggtcctgtccaggggcaacgtagcattgagatgaagaacctggggatgggctgcatgggttccagtcccggctactccactgctgatctaaatggccttgcagtgtgtcagttttctctgctgtgaagtggtagaaacaaatagcacaacagttgcatccaccccacagaattattgggaggaatgaaggaaacgagtgtagagcgtcactcacagtgtctgcggcgtagtaggtgcaccgtcaagcatagcactcattagtttttctctgtcagggtctaaggcaaccccctctcctccgaggcttcttttacatagctttgggatagaatggttttcttcatgtctctcttcagtctctatagttatcgtgagtttctccaagaaacctattctgtgaccagggctctggcagctgcatttcttgagagcgatttgctgttttacttctttgtgcctgttaggatggcttctcagtggattcctctgagaatgtcacggttagttttgtgagcccaggcagaaaacaagtagctcatgactttaggcaactcccaagaaacctgcaaatgtccctgagttgaatacgaaacggtttttattgaatgaaagtagaaacagaggaagctacggctttaccagtgcggccctctgggctgttgttcgaatgttactttattttataggcattcactgagccattttattgtggaatacatgtaaggtatttcttgcaagatagttttaaagagctaatggtccattctcagaaagaggaggtagagctatttcatgttttcatatttagcgtggcaagtgctgagaggagccttggaaaccaccattaggaagttgttactggaggaggacttcctttggctgtgggatgatagctcgtgtcagtagctgtttctttacttcattggaggttgccctggtcctttgagtctaaaggcctgggtactagacccagaaccaccatttcgctaaccgtggctcagagcaaagtcacagtactttgctgagcactttttctgcaccattagaaaggaagccgtaagaccacttgtgcctctccttacagcagagggttgggtgtggattttaggagcaagcacaacgatgcatgtgaaaatgtcttgtagaaatatgagatacaacaagacattacccttatggattatgaaggcaatttcttttttagattgagagggaacttaaagtttgtttcctgttaaatctcagtttactttggatcagacaaatttgcaactccggtgaaaaattagagccttagtgagcaaagctttcctgtaggagctggtgcttcctgggctgtatccagagacatggactgggtctttcccagtcccgctctgcccagtttgtttatgttataaggggcagtgtaacaagaagcatggacttttgaacccctatttgtctctccaccgacacctataaattaagaatcactggtggcattgtcatttcagatgagaaaagtatcctcaaaggaaatcggtgtgatataaaccttttagcatagaataaattgactgtcagagtgttgatggctaagacagagaagtgtgtgtgtgtgtgtgtgtgtgtgtgtgtgtgtgtgtgtgtctaatttagaatatactgaacctatgcagaatttctgacagtcctcatctgacccctgaggattttctgggtggcacgttaattcctcaaatagtaatgatgcttttttttttttttcctttgggtgctttcctgtaagtggactggaagggcagggtggtggcagtggagagaaatattatgactgaacagatatttaacatctatttccttgtaagagggccggaggatagtgatccttcttactcacaaatcaggggccacaggctccctactacagagcagtgcttatgagccataacttgtgtttggaactggcaaagacattcattccttcgttaatatgtttcttacttctgaaggcaaaaataatgacttagtttttgcaggtgtaaaagattatgctgccttagaatatcccagaggataggcacagtgttctctttctagaatttgtttagcaataaaaatgaaccgatccttaagttaatcaaaataaagcacttgacacattttcttccatgcttttgttttatagggaggcctttgtcttttctatctgttcgagctcataacacttcctccgacatgtgcactgtctgttgccttcattttctcctggctggatgggctgagagaagagggatgtgggagtgccgtgtgtggggattagctgcgtagagtgctgaatatctggtgtaatgattcacaatggcttgtgtttctaggcagtggaccaatccagctatggcagtttcttctggaattactcactgataaatcctgtcagtcttttatcagctggacaggagatggctgggaattcaaactttctgacccagatgaggtaaggaaggaggggcttgcgagtactgtgttgaggaaggatgagagaaaactcctggaaggggtggcgtgggcctgaatgacgtgttccaggattgggattcccagctctgccacttgccacccggagcaagctaggtagcctgtctgagctccaggttcattatttggaaaatagagaaaagatctatgttaccccatttgtcttacaggattagctgatagaaggcattaacgtgcctggcagtaggtcagttatcacccatagagctgcctcctgtgacttagcctcttcctagcccggtggctctgtgagtgtgaaaggggccagacagttcaagaggccttgggagattggctcattagtttcttatttcattacacacatgtttatggagtagtggttccgtgccatgcccaattctgaggataaaaaacaatgaacaggagagacaacatctttgttctggcagacatgagaaaatatttgtgccctggtatggaaaaaaaacacttcctgttgatgaaaggcaggtatgattgcagctcagctcctccgcttcacacttccctgttagatttcatgcttgcaaagcaaggagattttactaataatatgcggaaagaggagaatgtatagtgtggctttttgtttgttttttaaagtcacatatttaatcctagttcagggtcactgtgttttcatcaacttaaagaatcattgtgactcccatccttgcccaacccatgaaaaatggaattcaggagataggcccgaaaaatattttctatatctacatgaatctcaaatcatcttacttgagcatcatgggtcaccatgaatgggtatagcataggcatagaaacatatatatttggcctgtcttgtagatttttgcctactcctcctttatttttctttttaaatttcaggtggccaggagatggggaaagaggaaaaacaaacctaagatgaattatgagaaactgagccgtggcctacgctactattacgacaaaaacatcatccacaagacagcggggaaacgctacgtgtaccgctttgtgtgtgacctgcagagcctgctggggtacacccctgaggagctgcacgccatgctggacgtcaagccagatgccgacgagtgatggcactgaaggggctggggaaaccctgctgagaccttccaaggacagccgtgttggttggactctgaattttgaattgttattctattttttattttccagaactcattttttaccttcaggggtgggagctaagtcagttgcagctgtaatcaattgtgcgcagttgggaaaggaaagccaggacttgtggggtgggtgggaccagaaattcttgagcaaattttcaggagagggagaagggccttctcagaagcttgaaggctctggcttaacagagaaagagactaatgtgtccaatcatttttaaaaatcatccatgaaaaagtgtcttgagttgtggacccattagcaagtgacattgtcacatcagaactcatgaaactgatgtaaggcaattaatttgcttctgtttttaggtctgggagggcaaaaaagaggtgggtgggatgaaacatgttttggggggggatgcactgaaaatctgagaactatttacctatcactctagttttgaagcaaagatggacttcagtggggaggggccaaaaccgttgttgtgttaaaatttattttattaaattttgtgccagtattttttttcttaaaaatcgtcttaagctctaaggtggtctcagtattgcaatatcatgtaagtttgtttttatttgccggctgaggattctgtcacaatgaaagaaaactgtttatatagaccccattggaaaagcaaaacgctctcactgagatcagggatcccaaattcatgggacttatataagaaggacaattaatgctgatttgggtacaggggaattatgtgtgtgaatgtcatctacaattaaaaaaaattagcacatccctttacttacttgttatcagtggattctcggggtttggacttaatgttgagctaagaagcattaagtctttgaactgaatgtattttgcatccctggttttggacgacagtaaacgtaggagcactgttgaagtcctggaagggagatcgaaggaggaagattgacttggttctttcttagtcctatatctgtagcatagatgacttggaataaaagctgtatgcatgggcattacccctcaggtcctaagaaataagtcctgaatgcatgtcgttccaaactaacactctgtaatttttcttttatgtcttattttccaagagtcctccattttttgcaccccctcaccgccaactctgttattcagtagagagaagtgtacggctttctgattggtgagtgaaaaagtaacttgagacacgacctaagttgaagagtttagacttgctgagttttagaagtgatggaaattaagagagcatttcaataaaatgtgacttggctgtctttggaagagaagtgcaaggctttcctttgaagaatttaaattagtccggtaggatgtcaggtgagactgtgtatgcaaaatgaatggcacaggtgatgccagggcctcttgcttgggtctgatgtcttggcacagggtaagtgaaggttaattccagaagagaggaatgacttgaaggcaaaggaaactaaggaaggaggttcagtgaggaaaataaggttgtccatgagatttgaatagatttttagttcccccaaggtttaaatacaaacatagtcaagcaaggtagtcatctttctgctggttgtgagggggaatctgaaaatggagttttagaggaaaagtcaacatctaactagtgaggaaaagtgcctaatacaattagaatctccctcactctatagttgcccagttgaaaggataaggaggaggggtggcttttatggacttccatgagagaaggaaagaaatatttcaggtaagcttctcagggctggccctttttgggatttggatgagaaattggaagtactaactactttctagcatatctttaagaaaattgattgttatttactcccagatcctcttgcagacccagaattatcaggaacatagctctgtgattcatgagtgtccccatactgatgaattggagcatccatatggaaagcaaaggcagaattatcccagctgtattattttgatcttttggatgcaggtgccttaatgaagctctcaaaatattttaggagctgctcagggagtgttgggtggaactgtttggactacattgttttctcttagattatgtgatttttgttgggcactggcaaaaggtgtgtgtgtgaatgtgtgcatgtgtgtgaatgttgtgtgtgtgtgtgtgtgtgtgtgtgtgtgtgtgtgtgtgtgtgtttgcagacatgcaaaactgcagctgaaataataccttagatttctaggtaagtctttccacatttcaataatgggtaagagtagaaccagggccgggtatcaattattgcttgctgtttgcaaccaggcataaaatcactttctcaaatcatccaccgttcctattaaatttatgccggaaactctccttctgtgagtataactcctgcagttcctatagcagataagatataagaaagtgcctcctagtgctcctccgcccgcttgtttgctaaaattccctttctctctaagtccaccattttcaagatttgtagatagtgtattagttaagacagctttgtcgatctggccagatgttttttctcctttgtccaaaggccagagaccatcccaggaagagtggtgggtggtttatacactggaaatgttgcgtttatgctttttaaaaacacacgttaacttcagaggaaggatgggcaaatctggtctagctgggtgaaacccttattttcccagagatgccttaacctttgttggttttggctttagggttcagagtcacttttgttcccttctccattctggagagggacttcccctacatagagccctgatttttgtggctgtggggattggaggtagcattcaaagatcagatgtgcttttcctcactttggagatgaacactctgggttttacagcattaacctgcctaaccttcatggtgagaaatacaccatctctcttctagtcatgctgtgcatgccgcttactctgttggggtctatataaatttgttgaactcttacctacattccaaagaagtttcaaggaaccataaatatatgtatacatatacatatataaaatatatatattaaaataaaattatcaggaatactgcctcagttattgaacttttttttttaagaatactttttttttaagctgagaagtatagggatgaaaaagatgttatattgtgtttgactattttccaacttgtattttcatataatttatattttttaaaagctgaaaatttagaagcaagatgaaaaaaaggaaaagcaggtgctttttaaaaatcagaactgaggtagcttagagatgtagcgatgtaagtgtcgatgtttttttaaaaaaaaatgcaaaaaaattcttatggcggagttttttgtttgtttattttagtagctgatgctggcacatcattttgctggagagttttttatatactgtagcctgatttcatattgtattttaaactgtgtgaaattaaaaacaaagaatttcattcataatgct

SEQ ID NO: 9 - DNA, 110934 bp, Homo sapiens
gcagccgccacattcaacaggcagcagcgcagcgggcgcgccgctggggagagcaagcggcccgcggcgtccgtccgtccttccgtccgcggccctgtcagctggagcgcggcgcaggctctgccccggcccggcggctctggccggccgtccagtccgtgcggcggaccccgaggagcctcgatgtggatggccccgcgaagttaagttctgggctcgcgcttccactccgccgcgccttcctcccagtttccgtccgctcgccgcaccggcttcgttcccccaaatctcggaccgtcccttcgcgccccctccccgtccgcccccagtgctgcgttctccccctcttggctctcctgcggctgggggaggggcgggggtcaccatggccgaggcgcctcaggtggtggagatcgacccggacttcgagccgctgccccggccgcgctcgtgcacctggccgctgcccaggccggagtttagccagtccaactcggccacctccagcccggcgccgtcgggcagcgcggctgccaaccccgacgccgcggcgggcctgccctcggcctcggctgccgctgtcagcgccgacttcatgagcaacctgagcttgctggaggagagcgaggacttcccgcaggcgcccggctccgtggcggcggcggtggcggcggcggccgccgcggccgccaccggggggctgtgcggggacttccagggcccggaggcgggctgcctgcacccagcgccaccgcagcccccgccgcccgggccgctgtcgcagcacccgccggtgccccccgccgccgctgggccgctcgcggggcagccgcgcaagagcagctcgtcccgccgcaacgcgtggggcaacctgtcctacgccgacctcatcaccaaggccatcgagagctcggcggagaagcggctcacgctgtcgcagatctacgagtggatggtcaagagcgtgccctacttcaaggataagggtgacagcaacagctcggcgggctggaaggtgagtggactcggcgcgcggccggaccttgggggcgcggtgggtcaggcgagggcgcagctgtgcaggtttgctcggcctgaaggtgcggagcaggagggcagcgcgttcccaggagggcgggcgagaagcggtggtcgcggtggcctcgcccgggtccggtcggggacggcagtaggtgtgcgtgcgcgccagtcaggagttcgcgtgggacgcggtaaggggctcgttggggaactaagtaaagaaagtgcgccaagaagtggacgtcagagcgaggccgaaaagtttgccagtgaaaggagaaaggggttcgctgggagcggcaacccccggcccgcgccgactgcttcggctgccccttccctcccggacctccgcggggggagggcgggttctctccggccgcgccgcggagctgtttccgccgggcgcggcgggggagggcgcggcgaggggccccggagcctcgctgccccgggaccgggctgcaggtggaggggacaggcagggcgcgaccggccggggacggtgcagggcctgccgggcagtttctggaggcggtgcgcattttgctttgttttggttttctccggagtggcctcgagtgccgggggcccggcgtcccgagcccgaggtggtgcctccgacacgtgcgaaggggcggccaccgcctgcggagcgccggcgcctggccgcgcggggcgagctaaagttcaagtgtgaccctcggcgggggcgggcgcgggcggtggcggtggcggtggcggtggcgtgggaggggccccgggcgcaggaagcccgcgcctttaaagggccagcgcgtcggggccgggcgccgtggggccagcgtttctccatgcggggaagcgcccgaacttggtcttgcccctggtaggaggcttttagttagaaacacagaggctgccctgaggggccgggggctgggatgtgtgagtcttttcctgccttgccaccctattcttgagcatggaggaccaggcgggggggctttgcgaccaatgttttgagggagtcggagtggcggtgcgcgtcgagggagcggtgccttgaaggaggatttttgccatttttgcctttcagagcgtggccaggagagacttagcgtgggggcaggcacttcccgactccgaggagaaggcccgggggccctcggctccggggaggcttcccgggggcggggtccagtcgtggcgcggcctccccaagctgacagtttctcactgtcaccggtggcggaattgctgtaaaggctgtctagttgagctaaacacctccctcccctcctccgagacggagtctcgctctgtcgccaggctggagtaccgtggcgcgatctcggctcactgcaacctccgactctctggttcaagcgattctcctgtctcagcctcccgagtagctgggattacaggcacgagccaccacgtcgagctaatttttgtgtttttagtagagaccgggtttcaccatgttggccaggatgttctggatctcctgacctcgtgatcggcccgcctcggcctcccaaagtgctgggattacaggcgtgagccaccgttcccggccgagctaaacacctttttaaaacatacctttcttcgcctctcatattggactccacggcataataaagattggtctttgctgcgcagttgttaacaccaaggttattttacacacagtgtcatccctgtggttaatgcgtgtcaaaagggttaagttactcacaccttattgaagttcctttagaaggaattcaagattcattttattttttccaaagtgtgttttagagtaaaggtatcacttatcgcttcattaccaggcattacatgcaattttaccaagtgtttcaaaaaagtaaagtgccttcttaccgttaagttcagcatatattctattaagtcacaaaatcgaaattgtctgccaaatcttgttttacttaacatttgaatttaagtacttgacttacttgctcatctatcaattccacttcagctgttacagagtattagccatttaaaaaaaaaatcctcccccctttttttgcattcaaagtacagtgtgtacttacaccattctttagtccttggaaatggatacaacctacttcaacttgctggagtgcctttctttaaagataaaggaagtgttttgggatatttttagttttgcgtctcaaatggcattgtcagagtgttagtcttaaactaggaatatgcttacactttttaagatttaggtttttaaaaaatagattctgatgttaaatcatctttacaaccatttttatcaggttcttgttctgatttttttaaaaatgcaagaataatttagtttttttttaaatttatttgccagagctaggagacctgttaagttatctgtctggaattggaggcccttgggcagctcccagtgggagcctaatggggctttgctttggagtaggctgcctttctcaaatgagtaagtgtttcaggtgtaatgtcagttggtttaagtctgattgcagcaagtacattttcagtttgagtaaaagggtattttaagaagaaaagaaacaacctgagctgttctaactcataactagtcttttggttagtttcataaaaatgagttacttgttaaaaccaagtttcactctcagatctgaaagactcctgttctaagagtcataaaagagaaattttactatgaattttaacttaaatccagtttttaaatgcaaagcaaccaaaacttaactgttttaggaccgaggagaggttgctttggcacaaaatatttcctgtgatttactactgggaattaggctgaatctttaattaaatagtttcttgtgtgctgcttcctggggcctgcctgaaagtttgagtcatttgcataggacaaactagttggaaaactgttaatgaattcaaaaacttttaatgtcattctttagatagttaagtgctggttatatttgaaggatatgcattttgtgtttgtggggatggtatgttaaatgtcttacacttgttgtaatattggctagaattgctataaggtcacacacaaagtggaacctaagacttttggaaaacccgggatcttctaaatctagtgcagtatttataaataatgaaacttcatttccatgacctgttttttcacatagaaagccttctaaagcttgggaagtggtagtttgaactctgattttttttaataaatggcagttttgagttgactcttttgatattattaggaacactttaggttaaaagaatgactttgactataccacttaactcttgttaaataaatttttagattgttttattagaggtatcctctttgatttaaagataaatatcttttttttttttttttttttttttttgagtcagagtctcactctgttgcccaggctggagtgcagtggcgcaatctcggcttgctgcaacctccgcctcccaggttcaagcaattcttctgcctcagcctcccgagtagctgggactactggcacgtgccaccatgcttggctaatttttgtatttttagtagagagggggtttcacatattggcttggctggcctcgaactcctgacctcgtgatctgcctgccttgatctcctaaagtgcagagattacatgcgtaagccaccgtgcctggccccaaagctttttatttttaagataaatctttaattgggagtgatgtttcttatttggcctatgaactgacagtggatttccttatgttttgaaataaatattctgtaatttgggtataatctataggtgagtaattgaaccagccacagagatcccgttagaaagatggctgcttttttgttgcatggtcacatttgacttagagaatcctggtgagaccgagtggttagaggatctgagacatctttcctacttctggattgtcactgaaattaccttaaagaaagccttgataggctgggcgtggtggcgcacacctgtaatcccagcactttgggaggctaaggtgggcggattgcctgagctcaggagttcaagaccaccctgggcaacatggtgaaacctcatctctactaaaatacaaaaaattagccgggtgtggtggcaggtgcctgtagtcccagctatcgtgccaataatcccaactactcgggaggctgaggcaggagaatcgcttgaacctagaaggcggaggttgcagtgagccgagatcacgtcactgacctccaacctgggcaacagagggagaccctgtctccaaaaaaaaaaagaagaaagccttgataatcctgtatatgtacttggggaagcgataatgaagaaataatttaaaatggatgagggggttatgcagctaaatgtagcatcttattaagggctgaaagttacctgaatctatttgagagctaaaacattttgttcagaaattccaaaatagatgccaaattggaatacttcatttcagactcccaagagctttactttttacgcatggttttgtggcatgtccttggttgaggggatggcgagaagagtggcctctttttgaatgattctcatttttgttgttgttgttgttgttgttgttgttgttgttgttgtttttctgagccagggtctcactctgttgcccaggctggagtgtagtggcttgatctcagctcactgcaacctctgcctgcccctggctcaagtgatcctcccacctcagcctcccgaatagttgggattatcggcacgagccactgctcatggactagttttttttaagtgacaaacacttgactattgaaaataaggcattttaattctcatgtaaacttgaaaaaagttaaaggtcttcaagatcccaaaattgctgaaaaggtatcacattagcagcagacacatagatttcatgctccgcacacacaaggaatcttctccgaggcgatacgaaatgggatgagggggaagaatattcagtggcaagttagaatgccttgcagactgtaaacatgttgcctgtccttgtgcttctagccccttcatccaagcatctaaactgcagttttgtgttaggctttctaagatagcagctgtatttggctggaatttctctggggaagcctgaatgatttgcatttttctggaacactctgcccttggaaactacccagttccctggcatcatgggaatttacccagccatttttttggcctatatgtgctgtagctttggggctttttggggatcctcttggaaaggcagtgtaaataccacatagtgattggggaaggcagaattttcaattgtgtgggagttggtctgcttccctgcagttcaagatttgcctttgcctttgtagcaacaacttgcagagacttgcccagcccccccaggatctccctggggtcatataaccaagcaccttttcttggtacataaagaattctgatgcttctggtggtgttcctcagctgtgaaacagaagaccacatgtacttgaaaaagtatgtattttgatgcctaagggatatgctgtgtacaaatacttagagtgtggaagacatcttcctctttgccagttgctgatgaggatgaacaaaaatcaagtcagtggcacagaaattcttttgtaggtattactacttgttatttgtagtcttctaaggaacataggaaacatgaaaaacacatttttgtacgttggctattttatatggttcagcctttttaaaaacttgctttattcattagcatcccagtttactctattccgtcttctccctgtggtttatcaacttgtaggttaagcaccgccaatagttgaatctagggttgacttattcttgctacttggcaggcatttgggctactttttttttctttcatccatttttgtatagttttgataaaaactaaaaaggaaaacaaaaaagcaagttagttttgatattaagtcaaatactactaaaaaggtaaatctgcagctcctcatcatacaatttagtgaatttttaccttcacttattactttaataaggacataagttcaaaatgtgtcctttatttcaagccatattcattacaggaaaaaaaaaaaatcaagggagagctgtttagggaattagcctgtgtagcccccaattctggtttttgttctgatgatccctgaagctacactctttatgagagttgggcgtgtgtgtgtctaagtcttccttttcttttcttttctttttttttttttttttgagacggagtcttgctctgtcacccaggctggagtgcagtggcgtgatctcagccccctgcaacctctgcctcccaggttcaggtgattctcctgcctcagcctcccgagtagctgggattacaggcacatgccaccacacctggataatttttgtatttttagtagagacagggtttcaccatgttggtcaggctggtctcgaactcctaacctcgtgatctgcccacctaaagtgctgggattacaggcgtgagccactgggcccagcctaagtcttccttttcttttctttttcttttttgagatggagtcttgctcagtcatccaggctggagtgcagtggtgcaatcttggctcactgcaagctccgcctcccgggttcacgctattctcctgcctcagcctcctgagtagctgagactacaggcgcccaccaccacgcccggctaatttttttttgtatttttagtagagacgggatttcaccgtgttagccaggatggtctccatctcctgaccttgtgatccacccgcctcggcctcccaaagtgctaggattacaggcgtaagccactgcgcccggccacgtcttccttttcttagctttgctttgagaaatcgtttcttatcttggattccattacaatggtcctcctgccatctggcttctccagttggttcgcttatttttccttctcctatcctcattcataagtatacctcaggactagttgtggactttttctctggtattttcttaggtaacttactctctgttgccttgtgtatccagttacctaaaggctctggaggtcccacttttatctcaaatccagcatgtctaaaactgaacatactgtatttccccctgccctcagatggctcatttcaaggtccccagttgggttaatggtctagttagttctttccctagttttcaaaccttggtgtcttcttgagcactctcctggtgtttagtgttcccaagtctgttaactcttctttctcagggtctgttgagactttccgttcctacccgctaaccattcccctcgtttagcttttagtatttcaggcctagacgctcctgtccccagagcttagatcatcttgagccctgaaattcagcagatcttgctcagtgtgcaaggttcaagtcagttcaccaacttccaatcttggctcctacccagaggaatttttgtcctctgagtgaatatctggtaatcttttaattcatgctgctgtgtattatatataatttaactttaatgtctgtatgtcttggcttctcagttacattgtaaatatgttgttaggaaaaaaattctttcttgatacatgggtcttttatatttcagcttcctgtgtgttgagaatatcacagtctgtatcatgtgagaataatttaagaagtagtataactaaagaacagtgattattttgttttcaacagattgtcagagtccttttttttccatttatttgttgaataattactgtgtacaagatgtgctaggtgtttttgagtggtagcaatgactcaaaacatagatccagtaggaagactagatgcaatgtgtaagtaactatgatatacagtgggaagagttaagtgtcttagagaaaaatgaagttctgtattggccgttgaaccaggctttgaaaatgggagattgggcctggcacagtgggtcatgcctgtaatcccagcactttgggaggccaaggtgggcagatcatttgaggtcaggagttagaaaccagcttggccaacatggcaacaccctgtcactgctaaaaatagaagagattaagtgagtgtggtggcatgcatctgtagtcccagctacttgtgaggctgaggcaggagaattgcttgaacttggggcagggggttggaggggtggaggttgcggttagccgagatcacgccactgtagtccagcctgggcgacacagcaagactcccatctcaaaaaaaaaaaaaaaagaaaaaaaaggatgggagattgttcccttacgatttcgctatgaaaattttcaagcattcagcaaaattggaagaatttctactaccttttctactaatgacatttcattatgcttgcttgatcatatatctgtgtaaatgcacatctttctgtccattagttcatcttattttcaagatatatttttgggatggtggactggcattcataaaggcctgaaaatatgggaagcatcagtttctctgagtgcgaagtcaggagattgagaccatcctggctaacacggtgaaatcccgtctctactaaaaagacagaaaaaaattagccaagtgtggtggcgggtgcctgtagtcacagctactcgggaggctgaggcgggagaatggtgtgaatccaggaggcggagcttacagtgagcctggatcgtgccactgcactccagcctgggcgacagagagagactcggtctcaaaaaaaaaaaaaaatttctcagagtgataggcatgtgaaatacacaaacagtttgaaaagtataggtagaaaggacatattatgaaaataatgctgtgttatggaccaaatttatcaaatgatatctttgtttttgccaaataagaaattatgaaaatatgattacattaaacaattttaaaatgcaactacttaggaacacacttgtgtaaatatggagacctatggaatgcaatttatagccagtgtactgcagttgattttgaaactgacatacggaatttggcaatacatagaacagattatgtaattgacttaatgtgaatagttggcatttacaatgtatttagctttttgcttgatctgttctttaaaattaacttcagtgaggcccagtgtcctggtagcagagtgattcaaagaaagaaagattactattaaattaagtcttgcttttttgaaaaatgagaaattctgaattgaagtcagcaatttcaaaatatacttaaggcaattatgagggaaggttatattggcttgaaaagatacttcaaaatgtaaatgtcagttctaatattgccttagctaaatattagatatccttgatggctttcttattgcaataattatcttcccactaacccaaatgcaagaatgaagattataatgggatatttcaatagatccagaggaggttaaatttggataggccaaatgcaaaactgacaccattacagtccaataggactgaatgtattaactgttaagtgtacttggagtgagtctgactagctcatgttgaaccaaaaggtttatgcagtaaaaatggcattgtggcacatcagaaggcacagttgtagattaaataacactcatcagccatttagaaatggcaagtgttgaggagagctgtccgggcgcggtggctcacacctgtaatcccagcactttgggaggttgaggtgggtagatcactggaagccaggagttggcctggccaatatagtgaaatcccatctctactaaaaatacaaaaaattagccagtggtgatggtgcatgcctgtggtccctgctacttgggagactgaggcacgaaaatgcctcagacctgtgaggtggaggctgtagtgagctgagattatgccacgacactccggcctgagcctgggcgacagcaagactctgccaaaaaaaaaaaaaaaaaaaaagaagtgtagaaaactattttactaatatatttatccctatagaagcagacattttatttaaaaggtacattgctgatgaggggtgggggacagttaaataaatgaaaaagcccactaccgtgaggttttattaaatgtctaagttaccttccacgtggagaaaatagctttcagacgcaccaggatctcacacttgcatgattgttaatgatgtcaggcaaaactagtcaaaaccaactaggaaacaatatggaactggccagtctaatttttttttttttttttttttgagatggggtctaactctgtcaccaagctggagtgcggtggcccaatcttggctcactgcaacctctgcctcccaggttcaagcgattctcctgcctcaccctcccaaatagctgggattacaggcacacctgtaatagtagagaccaccacacctagctaatttttgtatttttagtagggacggggtttcaccatgttggccagactggtctcgaaatcctgacctcaactgatccacccaccttggcctcccaaagtgctgggatcactggcatgagcccccacgccctgccgaccactattgatgtttgtagatccagtgaagttcagaattacagcacatctttggtcttttaatttttgtaagtaaagatattatataaaacatcttcatccttcaacttcattctcatcttggttctaattttgaagggagggttccctgagggttcttatctccctcagggaagggaggtagatcatttctttcaagatagcctatctctgctgaccttaagtcataggagttctttaattcttagagacctctgccttctcagaggccagtaccacctctaaagtgtcgtggccccttggtctacactgcagcacccctcatctgggaagtgctgttatctccagtaagccccactgtattctttatacatctctggccagccacatatagaaatttccaggctgtcaactttttcagtgtgacttggttccagcatcttgtatacagatcttcgagacctaaaaagaaaatcttttttttctgcgttgatgtatttttctccctagatgatgtttgtctttttctttttcttctttttttttttttttgtgacagagtctcgctctgtcgcccaggctggagtgcagtgacaccatctcggttcactgcaacctccgcctccagagttcaagtagttctccgtctcagcctcctgagtagctgggattacaggcggccaccaccacgcctggctaattttttttttttttttttttttttttttttagtatttttagtagagatgaggtttcactgtcttggctaggctggtcttgaactcctgaccttgtgacctgcccacctcagcctcccaaagtgctgagattacaggcatgagccaccgagcctggtcagatgatgtttgtcttaataaagatgtcattcattctttgagcagttccagttacagagctggtcctaatgatataccccatgagcttaacagccctggaacccctacctgtcttatctgataagggcaaaactgtgatgagaaagagggtggaagagagggcttcccttgtatgcttttgttcttttttgtttcattaaagatatttcttggataaacagtttttctcaattgctgttctaacagtctggaaaatataggtcatggttttgtgactctctactcttactatgttagagatatgataaagcatccatgttgagggaaaatatgtgtttctgtttaaaaccgtggtttccccatcttgaaggtgttatagtactgcctttgtaagtactggtgagtacttacaaagtacttactggtgaggggctgggtttttgctcagttaaaaatctgaaagtagccaagtgaacctggcatcaggaaagggagggaacctctgtggttgtattttgtaactgcagtaaaaaagccaatgcgcatgattaatcctcctaagtcttatttgggcctaatgaggaaaggaggaagagggaaaccagtttgcattatgtgggaagataaagatttcttcaatggtttggtattctgaagagttagctgaggccgggaggcactgggctttgtctcctcagtgtttcggccctctcctttcatattggttttccttttttaattaaaaaattagtgcatttcctctgcgggtaccaggctcagaagcctgccatgcaagtggctgagcgaaaacccctctttgagtgaggaatccccagcacagaatgagagggtcttcatcttgcagcagtggcaagggtgagagtgaaaaggcaccctgcattctgtacctgaaaagaaatgcatttagaggctgggcgtggtggctcgtgcctgtaatgtcagcaatttgggaggctgaagcgggtggatcatgaggttaggagttcgagacaagcctggcaacatggtgaaaccctgcctctactaaaaacacaaaaattagccaggcgtggtggtgcgtgtctgtaatcccagctactcgggaggctgaggcaggagaatggcttgaacccaggaggtggaggttacagtgagccgagattgtgccactgcactccagcctgggcgacagagcaatactcttgtcttgaagaaaaaaaaaaagagaaatgcacttagatttcaaatttagtttggaaagagaaattataattgaatcacctaattcccaggcttgtaaatgttgtgtccttcaaagcttgaaagcaaaataaccacataaatatttgggagtggttcatacaagtaaacgtcaaatacttgagacattttggttgcttggaagcaaggtcaaaggaaatggtttgcatatggtttagctagaagctcttattttggcagattcttgaggtagtaacggtcacaatgtggattttattgttctattttgacatgaaaaaggttttttctcttctctaaccttcaggatagagttgcataagtaacatcaagataggcatgttcagtcaccataattttgtatcagagatgatgtgccttcatgagctgtgaggtttaatttgcagaatcatcagtttgggccggcacggtggctcacgcctgtaatcccagtactttgggaggcctaggcgggtggataacctgaggttaggagttcgataccagcctgggccacatggcgaaacctcgtgtttactaaaaatgcaaaaattagccaggcgtgttggcggaccctggggagccagaggttgcagtgagcggagatcttgccgctacactccagcctgggcgacagagactccaactcaaaaaaaaaaaaaaaaaagaatcaccagtttgttacaccagtaggtttcagcctgccatcattcatactatactgtgatttgaatacaggagaaagtgggctctcttgaattacagttacctcatctgtttgcagcagaactctctctctgcagggctacctcctaaacggggagtggggagggaggagaggggaacttgcaaaacttgtaaatatcgattggggttgtttgtgtacttggcaccaagctggttgcattggaaacttttctctctggatgggtaggtatgtaggccatcatgaaatttacatgtggtgaatgggaaagcttcctgtggatcatcctaccctgagagttcttcaatctgtatgactgaattggtctctccccttcaaccttttaggatttaattttctcttcagtggcccattatgacatttacatacgttgaatttgaaagattcccatactcccagtctcttctgttaccggtgtgcctggagcagtttgttgaatttgtgaaattttgagatagaatgaattttgtaggacctgaatttatttataatcttatatttatattataaatatgatgtatatttagatgtatatttatgttataaatataatgtatatttagatgtatatttgtatgtcatgtatttgtattaacatgaagtctttctgatgatgataaaacactatttttaaacatttagcagttgatgactacattttagaggtcatcaaaatgttttattttttcctctcttgaagttatttggtataattaaaaaaattcatactaaggaaatttatcagggttaaagattcctgtaattaggcatgttttgatgttattgatatcctcttttctggttttggagtggatactttccctgctgtgacctctgtgctctgtagtggttctcctagggaattatattccagtaattctgggtatttctttaaggtgctttgtatttcttgaagtgccattttgatactttcagtgttctgaactgtacctagaacgtactttttataaaaaggaagcagagtccatccaggcagagagagtactgtgtgcctgtagtcttgtctattcgcaaggctgaggccagaggatcccttgagcccaggagttcaagtccaggctgggcaacacactgggaccatgtttcttaaaaaaaaacaaaaacaaaaaacaaaaaacaaaaaaccaaaaaaactaggcagtgcgtggtggctcacacctgtaaccccagcactttgggaggctgaggttggcggatcacttgaagtcagcagatcacttgaggttaggagtttgagatcagcctggctaacgtggtgaaacccagtctctactaaaaatacacaaattagctgggcatggtggtgcatgcctgtagtcccagctactcgggaggctgaggcaggacaattgcttgaatccaggaggcagaggttgcagtgagccaagattgcgccactgcactccagcctgggtaacagagtgagactccatctcaaaaaacaacaacaattaacaacaacaaaaaccaaagctaaacaagagcagaatccagattattaaaataacaatttaaaaagcatgattgtcacaggcttcaataattacctgcctgctcttgagtgtttaggttggtcttggaatcggcctgtccctgtgcttgaggagtggaccctcagggtgtcactgcccttctttgtgatctctttttagcctactgtccttcctttggtgcctaactcagaaataaacattcttaatctgttcagcttaattgagattcaaacctcttaaaaagtagttttgtcaagaggcgtgtgaaccagagcaactccattttgaataggagctgggtaaaatgaggctgagacctactgggctgcattcccagacggttaaggcattctaactcactggatgagatagttggtcagcacaagatacaggtcataaagaccttgctggtaaaacaggttgcagtaaagaagccagctaaaacccaccaaaacaaagatggccacgagagtgacctctggttgttctcactgccacactcccacaagccccatgacagtttacaagtgctgtggcaaagtcaggaagttactctatatatatagtctaaaaaggggaggcatgaataatccacccctcgtttagcatatcatcaagaaatagccataaaaatgggcaatcagcagcccttgggctgctttgtctacggagtagccattcttttattactttactttcctaataaacttgctttcactttactctagggactcgtccagaattcttccttgtgggagatccaagaactgtcatttgaggtctggattgggacccctttcctgtaatagtttgaatgttaaagtttgtgccattgcattctttggtgtgattgctttattctgaactagaggtgaagaatgtggggaatgtggaataaaatgaagggaatatatcagtacagatggagctcataatttatggtgaatttctcattcctcacaattggagggtatatgtttgaagtgagtcaatttctgaatttattacctaatttgattgtatgccttatacattatatttttaagaaaaaaattaaaataattattgtgctctgtgatctcattgaacgatgtaaatgatcttgggtcatgtaaaatgctgaacatataggaggaccctacttaataatttcctttgcgatgaaaatagggacacattttaatcaaagacaaactgttgatggttatgtttcttagactaaccatgacttccgcctgtgtttatggcaagaagggaaaaggaaaacactttcatccacagaagtcatcaattctgtcatgattgacaacttgggggcctccaattaagcctcatttatactccccaccccccatttttttagagaattgattttaaagggtattgggaggaagaagtaattaagtcagagagataaaatgagaacttaaaacacttcagattgtagagtaatgcatcagagggattcttttcaagacagaattgtctgtgatccttaactgtgtgaatacactccttggatttgaaatgaagacaacccctttccacttagtcatgtgccctatgaggcttgtttctgtgtggcttgctgagactcacttaaaatgacattgacttttattaaaccttaaggtttgtgatgggctttttgcacaaaagcctacttctccaggggacgtccctgctctctcaggttgctatcttgttactctggcctgaaacaagttagcagccactttcccgcagacctgcacaaggcacatcacatcaacggctgttgattagagcataatgacttgttagatcatgtttattgtgcaaatgaacctgaatgttactaggacagcatatccatgtaggcttagaaaacttaatttttaatgccccttctatctttcatcaggctaaagcttttggatttatggttattcattctagctataaatatattaatagtattttgggctggtcagatatggggcatgacctttgacatcctgcttggctatgcctgggaatttgacatccttcaatttaggtggaattcccttgttttgtttcctgtgatagtgtggggaaatacacattttggctccttcggcagaggaagacaggaaaaaagtaaaattggaatgcactaagaaagtattaatgattttatttctgctgtgtatagttgaatgcacatgctttttatggaagcctgagcctatgaaaatagtgcacaataataagaaaatgctaacaatcatatttagtttttgcattttttaatttggatttattttttgactagtttgacatttttgggtttttgaactgttttgcatctaagtatacatggtggaaagaactttttgtgatgcctttactagtattatcagtacagagtatcaacagttgggaagagctacaaaagggaactcttagccggtgtgtattttgacctgaggaagggagtgttctgttgctaccaactaaaagtttatgagtgtgcttctgtttcctgaatgtaatcagcacctccatcaataattatccctgtaggggaacacaatatggctttcctctactgtaggttctttgactgagccaataattaaattgacataaggcagactaacaagataaaaaaaaaattgtattttcttatgcactggtgactcgaagaagagtcagatgattgaaacttatagagcatcctcagctataagttaatggggattatacagataaaggggaaaagacaaagagactcttaccactcttgctttgaccagactctgcaggcatagatgtgggagcccaatgtggtaaaaagtcttagctacagctggcgttttgtcagggtctcaggatcctgcagctggaacagtcctggagctagtagtgttccagccagtgaaggatgctccacattgggcaccagaagctatatagcagggaaaaatggcttccccccatccttctaggttctttgggctgggccatgatttaaattgacactagatagctgggcgcggtggctcatgcctgtgatcctagcactctgggacgctgaggctggtggctcacttgagctcaggagttggagtgcagcctgaccaacatggtgaaactccatctccactaaaaatacaaaaactagccagatgtggtggtgcacggctgtaatcccagctatttgggaggctaaggcatgagaattgcttgaacccaggaagtggaggctgcagtgagctgagatcacgccactgcactcccgcctaggtgacagagcaagattccatctctgggcaggggaggggaagaaataaataaattgacacatggtagactctaacaggagaaaatgtcattttatttatacttatgtttgcacaagagtcccacaaaatgtaatgcaggttgcatgattgaagcttatattgtatactgagctaagaaaagaattagggtttgaggtttttggtggggtggtggccacacaagttaaaggaggatgaggggaagaattatatggtgaataaagattgtcttgctcttggggataaagtctctcaggtaataaaagttgtctggagcagtcctaatcctagtacagatactttactaatgtagacttcctttatggatgcaaatttcttttacaaaaggacagcttttcttgtctactctggtgtctgcagtttcacagaataaccagctcaaaatatgccaaggaagtatattttggggtggcatattctgatctcctacagtcatattttggggtagtgtgtcctgggccccaacatcccttttgaattgttacgaagttcaggccgggcgcggtggctcacgcctgtaatcccagcattttgggaggctgaggcaggtggatcacttgaggtcaggagatcgagaccaccctggccgacatggtgaaaccctgtctttactaaaatacaaaaaattagctgggcgtggtggcacatgtctgtaatcccggctacttgggaggctgaagcaggggaatctcattaacccgggaggcggtggttgtagtgagctgagattgcgccactgcactccaccctggagacagagccagactccgtctcaaaacaaaacgaaacaaaacaaaaatgaattgttatgaagttcaaatgtccaaaattcgatgaagcggagggaaattggttaagctagaattttataatattcaccttttagaagtcacagtagttggctgggcgcagctcacggcaccaacacttgtaatcccagcactttgggaggctgaggtgggcagatcacaaagtcaggagtttgagaccagcctggccaatatggtgaaaccccatctctagtaaaaatacaaaaattagcactccagcctggatgacagagcgagactccatctcaaaaaaaaaaaaaaaaaggtcacagaagtcaacttttgctttaaaaaagaaaaccacaattccttcacacccctcaaataatcaattaataggcttgctttttgttcattaatttttttatttcccatctaaggctgatatccatcatagactaattaaaattgtagattgtggggagtctatctgttctgttctcaattattcactaaatggagagtgccatgacttttttttttttttttgagacggagtttccctcttgttgcccaggctagagtgcagtggcgtgatctaggctcatcacaacctctgcctcttgggttcaagcaattctcctgcctcagcctcaccggagtagctgggattacagcaagcgccaccatgcccggctagttttgtatttttagtagagacaggatttctccatgtttgtcaggctggtctcaaactccagctgccttggcctcccaaagtgctgggattacaggtgtcagccactgcacccggccagtgccatgacttttgagggtgcacatctaaatggctgatattaaaaatgagtactttttgatcacttcctactccccttccctagtttttcatctcttctttgctttccttctcattttcggccccctcatttaaaatatttgacttgaataaatttctctaactttaattagatgaaaagtttctttaaaggtcattgctggttgctggtgtgagttttaagtttgctacaacaaccctgttttacttattactgcctttagaaatagtcattgttattaatagaactgatcccatttagaaatatttgcaggtggtgatgatacacttcaccctgggcgtgaacatgatgcaagtcaccttaaggcctgtaaagaggaaatccacaaggagaatgacttaggggagtgagctaaatggaagttacctctgtgtactttcaccttttaaactgaaaatatgtaagtatgtgtttgtcttaccatagttttactaccttcatagtgttctggtaaataggacctttaaaatgagcagggaaggggagggaaacagtttttctggcagctgatagtctggatatatagatgtaaatttccactgaaactgcacctacccaatccttttcctactgtgacatgtcattaactcatatttgacttttgggaggagagaactacaaactcatgcagaaataccaaggtgtgaggtaagaagtcatagccatttcagtattctagatgtgcatgtcaccagctgttgtcattgagctaaatgcctttgtgttttcagtgttgtctcgactctgtcgccagcagtagtctggtttagtctggtttagcaaattctgcagccttcctgcctcatctgtgttgaatgctaagattagtaactttgagatgagtagtgttggctgccttcacattctgaagttcttaattttaacttctggcttagagaatatgagaccatggactggatggagaagtctcttaacattagtaaaaggagttaaattctcagggtggtttcgcttttgtgcttgaatgaggatgggagagaatactgccattctctgtgttttgggtgaataatcccaaagacattttatatgttgagagtttagaggtttgacccaatcaaaccgggaattgtataactgggatgtccaataccaaggcctctaagctcctgaaaaacactttagaagttcctgagccatcattgtatgtgtgacctggtatatcccaccggactcacgtgcaggtcttaacattgtgattttttttctctggctctggttagatttggcttttactctatctctggcttctaatcggtcctcctttcattctcccaccctacttttctctcctagtaaatttttcctttctgttagaggcagtaaagtcctcactctccttgtcagtccacatggaagctttgcctacttggctccccttggggtgcggtgaggtgagaggaggagtctagtcctgtgctaatcgcagattgttggggacatgtgtttcaatttcctttgtctcagttttcccacctgtaattttggagcatgataatgggccatccagtgctagtgtctgcaaaacttgcttcgagatcactggacaaaaggtgctggttagatatatttactggcatgccctgggaggatgtctttagatcactacagtattccaaaactcacgttggggtcacgtcagaatgatcagaattccctctagcatttgctctttataatgcactcatgagcctaacttagatctgtaattttgcagtaaatattaggagtttttggttctgtttctgcattggtaaccagataattcctatttagacaagtcacatcactgcggtactagcatcgtcatctgtaaaatggggataatgatactgctgggaagtacttgtaggacaagttgaggtgctcaaaggaaggagctgtgtaattatgctgtattatacagcaatagcattagccaaaatacttggacttaaagcttagcacacctgagattctggggttttctttttcttttttttttaaattacggacattaggattatatggaatatttttacataaaaacataagatcagaaccaaagaaagaatcaaaacctttagacctatctttcctagcattcctagtaattgtgtagcaagtttgataagggtgctctggcagacttatattgtttttgtgctttggaagaacttctgatgggatggggaaataacctggcagcatgagaaagtggaatataaaattgtatatcaactgatttcaattatgtgaagtatcttaggctctactgtatagctgtactcgggaggaaatacacccagagtttgcagtgggttgtatttggagtgtataaatacgggtaagttatacatatgtatcttcttttcttttttttttttttttctttttgagacggagtctcactttgtcacccaggctggagtacagtggagcgatcttgactcactgcatcatctgcctcccgggttcaagcaattctcccacctcagtgtcctgagtagctgggattacaggtgcctgccatcacacctggctaatttttgtatttttagtagagacggggtttcaccatgttggccaggctggtctcaaactcctgacctcaaatgatccacctgctttggcctcccaaagtgctaggattataggcatgagccaccacgcccggtcctgtattacattttaagtaacaaacacttttaatagaaacattaacaattttgaaatgaaaatgctgtttgtggttttcaggctctcctccttgagagaattttggattcaagcaagtcaaacttgagattatttgtattttttatttttgggagaggatctcactctgtctcatccaggttgaagtgtagtggcacagtctcggcttcaccttctaggctcaagcagtcctcccacttcagcctctgaagtagctcggacacaggtgcacgccaccatggtagactacttttttgtatttttggtagagacggtgttttgccatgttgcccaggctggtttcgaactcctgagctcaggcaatctacctgccttggccttccagagtcctgggattacaggcatgagccaccctgcccagcctatttatgctgttaaagggaagaacagagggctggaattaaactttagagggtcttttatgggataggcagtgagacaggactgagctgatcatgttaggattccaaagggtaagtttgccaagcttatatctgtcatctgatagtctggatgtatagatgtaaatttccactgaaactgaaatttacatttatatgtggtgacaggcatgagagatacctttttggagtatagttgccggtgcaaaagtgaagacagactgattgagggaagtacactggttgagggaatgcccattttttgagaggacattcgctgactgtatgtctagattggggtttggttgcatctgctacatatcctagcacttcttaagaatgtgaaaaaaatctatagaattagacctgtttttcaaagcagtgaagttacactagctacaaaaaagaagctgatatttattgtgtgcttactgtggcaggcactgctataaatgccttttattttagtctcataaacatataatgtagatattcccactatccccaatttgtatatgaggaaactgagacacgaagttgagtaatttcttgaatgttacacagtaaatggactcaagatgccaatgtgtatttatttatttatttattttttgagatggagtattgctgtgtctcccaggctggagtgcaatggtgtgatcttggttcactgcaacctctgcctcctaggttcaagtggtcctctcacctcagcctcccaagtagctgggattacaagtatgcgccaccatgccctgctaatttttacatttttagtggagatagggttttaccatgttggccaggctggtcttgaactcctgacctcaagtgatctgcctgcttcggcctcccaaagttgctgggattacaggtgtgagccaccgcacccagctgtcagtgggtttttaacctaggtctgtgactcttaatcacttcagtttgctacagcaaagagaataattatctttggaattttggagaaaaaaactaggacttaaatttgaaactggaaatactaaagtaaaataaaattaacggctaaataatcagttaattaacagaatctaaacaattaatgcacatactgacaatcctatggtagaagtcttactggctcatccagctagttaactagactcttaaagatgaaaaatatataatgatatatatatatatgatatatataatgagatataatgagatttatgtcaaagtattagtgaattgttctctaaggagaataattcaggtgtgtttgtggtgatgattaatgagcggttgggaggagttgaccaagtaaccctgtcgtggctcagggtgtggtgaagaggagttgcctgtggtttcctcaccagatggataggaaggctctatttagttggcttcactgttggctctgtcaccccctacacatactgcctagaagacggaggaaaagaacctccttttacggggaatggaaacttgtccttgttgttgctgtggggttggcacatagaaataacaaacactggccgggcacgatggctcacgcctgtaatcctagcactttggagggccaaggcgggtggatcacttgaggtcaagagtttgagaccagcctggccaacatggtgaaatcttgtctctactaaaaatacaaaaatcagccgggtatggtggcaggtgcctgtaatcgcagctacttgggaggctgaggcaggagaatggcttgaacccaggaggcagaggttgcagtaagccgagattgtgccattgcactccagcctgggaaacagagcaaaaactctgtctcaaacaacaacaacaacaacaacaacaacaacaacaacaacaaaagaaataacaaacactgacctgtttggacagaaaatactttgttcttggggtgagcttaagcttcaggaaggctactgatactttagttaagggacgaggacaaaaagaaatccttaagctttcatccacattttactaagaacaggtcagtccttcccattaggtactgtctctattgcatgcacaggaaactgaggtgaagagaagcgaagtgacctgctccagactgaggtcctgagactcagggcttgggggatgctaaagccgcccttctaactggatcatcagatgagcagaatagcgcccaggagcgccctcattgagaaagtcttttggttttgctttggacgatacttagagagagagagtgtagtgtagttcagaggcagtggtaaccagggctaccttcagagccagacattgcttggcttaggactctgcttccaaataatgttcatcgtccctccctttccctttccttatcctttaaaagaaatcacagtgacctaaagcaattcttttaattccctttacatatgatgcttgcatgaagtgtgtggccctttagctttttcttgagtaattggttcctaatagatggacaggatttgtgctattttagtgtaggattatctagagtttttaatgtttgttttattcaaggagtggaatctatggccctgtgggggcagaggttctgtagtgtttagaaccttgagtattgtcacaaatccgttcaagcttgtttaacttaaccttggacaaattaacatttaaggataggttttctcacatgtataatgaggatagcacttgctaagattgtcgtgaggattgagggattgggtttgccacataaggcaaaggttgctctctcccgttctcagtcgttttattttcgaagatttttcagatagaagggagaaaggaaaaaacttctaattaggtctaaattcttcctctgctaaagactgggctagtggttctcagctggtccctctgacatttggcaattcaagaaacatcttttgttgtcacagcttgggtggggatgtgttgctactggcatctagtgattagagatcaggggtgctgctaaacaccgtgcaaagcacaggaccgacctcccataacagagaattatctgaccagtagtgctggccactatgtgtgtcagtagtgctgaagttgtgaaaccctccctgctctagacaaaattagtttatttttttcctgcatgaaaatgcctttgttgcttagtgagtgattttgaactattggaataaaaaactgagagaattcctaacttagttactagtgtttttatttactgcacctaaaactagaagaatgacgtgtagggctctggactactgacaggcgaccctgtggtagggccaagcagggttagactgtcagagggtctgacctcctattccatcagccctgaggcttgtgacctctgaagagatgagtcactctgctggctcttgaaccttctccatatccctgcttcccttttcattgtcttagtaactgttgttgtttttttttttaaagacagagtttccctcttgttgcccaggctggagtgcagtggcactatctgatctcagctcactgcaaccccctgctcccgggttcaagcgattctcctgcctcagcctcccaagtagctgggattacaggcacgcaccaccacacctggctaatttttgtatttttagtagagacggggttttaccatgttggtcaggctggtctcgaactcctgacgtcaggtgatccacccgcattggcctcccaaagtgcttggattataggcgtgagccaccgtgcctggccttagtgactgttctggagttacagaggtggtgcgctgccctgccccccttccttccatttcagaacttccagtgatggtctgaagtttctactgccttcagtgcctcatcacagtatgaatacagtgcccatccttctgatgaccacttctcaccactgtcgtgagtgggcatgtattttcctaggaccattgccaccttctgaaaccttaggccccctcctcctcctcccagactgcctattttgctgccttttttgtgaagcttgttgtcttgatttcctccccaattgaatgggatttctctgtttcctttgattccccccttaacaggtgtgctctctcttggaactttttgtgagttagtctctcgcccccaaatctcattggactgtaagcttttaagggcagaattctatttacttttcctttctggtcccaggaaacatcttaatatttagtttctcacacacaatgggaatgaaacagacatttaaaaatgacaaattttagcttttttttttgttggagaagcaaaaatgtattctttcatataatgtcttccttacatcacttcaacgttcctctataagttatctccttatggtgatgatggtgatgccagaggttctcatctggcttgacatgtttttctagtgcatccttttaaattactaggtccttaaattaaatgatctggttcactgctgtcattgtactaaactgaccctaaaccaatccttgctgttcctaaatttagaaacagaaagaaccttcacagcattccagcctttctgccactgaagtctactgacagaaaaaccaaatttcaagaattttttaaaatacaaaaacttttaagtgggtagacatatcactgttaactcagtagtggactgttggcagtaaaatgtgtactacagcttgcaaatgaccctaagtgtggtgcctccagtatcttagtctcatctgtaatacagataaacatgaactttttctgcagttctgtatagtattgcttatctaaataaccagttattcccataaagtgagtagttgctgaggaagtcagtatagtagagtgcgtaagtgcttcggtttgccggtcacactgcctgggtggagttctgccttcagtgcttaccaactttatcacttgggcagttgacctcctgtgctgctctttactcgtgtgaagaatgtaaatagtaactcttataggttgttgtgagaattgaacaaaacataaaatgtgttctagagtagcgtttgctgtgtaggaagtgttttataaatggtagctattattatcattactttggtgaagtacagattatatatagaaagcagaaaatagaaggctgacattttttgagttggttaaaatttgatagctaggaagacgtaaggttgagggtgaaatcccagcaggacctattgtaacctttttttttttttttttttttttttgtgatggagtctcactctgttgcccaggctggagtgcagtggcacgatcttggctcactgcaacctccgcctcccgggttcaagctattctcctgcctcagcctcctgagtagctgggactacaggcacgtgtcaccatgcccggctaattttttgtatttttagtagagacggggtttcaccgtgttagccaggatggcctcaatctcctgacctcctgatccgcctgccttggcactcccaaagtgctgagattacagacgtgagccaccgcgctcggccataagctttttacatgggatcaattgccactgccaccagaaaggctgtcacagtgttgagttggggtatctttctgtcaagtttgaatccaaccttcctccacttgtgaatgaagttcttaatcttcatgcctcagtttcctcatttgtaagttggtgcaataatgatcaagggttgttatgagagctacataaattaataatacatggtaaggtgcctaaagaacagtacctagcgcatagtattcaggaaaagtcactgtttataattacagtagtttattcagcctagcacttgtactccaccaggtattgtgctaggcttcttgttatttccttcttttaaaacaatattattattattttttggccaggtgtggtggctcacgcctgtaatcccagcactttgggagtccaaggcgggtgaatcacctgaggtcaggagtttgagaccagctactaaaaatacaaaagtcagctgggtgtggtggtgcatgcctgtaatctcagctacttgggaggctgagacgggagaatcatttgaacccaggaggtggaggttgcagtgagctgggattgtgccactgcactccagcctgggcaacaaagagtgaaactctgtctcaaaaaaaaaaaaaaaaaaaagtttttgaaaaatagaaatgggatcttgctatatcgaccaggctggtattgaactcctggcctcaagcagtcctctcatattggcctcccagagtgctgagattacaggcatgagccactgggcccagcccattattttattcttacagtagcctttcatggtgtaagtatcatcaacattttacaggtcaggaaatggagacccagagaggtagaggaccctaccttgtttgaggttgtacagcttgtgtggcaaatgtttaacagaccccaccattttgttttttgttttttgttttttttttgatggaatctcgctctgtggcccaggttggagtagggtggtgagatctgagttcactgcaacctccgcctcccaggttcaagcgattctcctgcctccgcctcccaagtagttgggactacaggtgtaccgcaccatgccacgcctggctaatatttgtatttttagtacagacagggtttcatcatgttggccaggctagtttcgaactcccgacctcaggtgatccgcctgcctcagcctcccaaagggctgggattacagggtgagccacagtgctggctcccactggtttttacagatgggcgccactgtgggtctgtcacatgcatgcatctggtccccagggaggggcagcaggtagagtacagctcatcctgatggctgggacctctgtcacgtccccagaagtgggcagggcaggccctcagtggaggggagaggactcactctcctcagtggtgtgcctgaccatccagaggcctttcctgcacaaggcatcagccttattgactgtagagggcagtgattagaggtgagaaatttagcttaagggattgcccagacatgacatctcaattttcctctgtaaaaatactcttccagactcgtggtaatgaaaatattttcattgtagtcttagcaggttatttgtttgacaagcagattataaagctgagtaaaagcaaaactgaccaggatgatgatattttgaaaactgactcagtgatgtaaacagtgcttctacctggtccccatggatgcagtattaaactggaaattaagtccttaaaagtccttaaccttcgtgggttaaagtgttctttatcaggaacagtttttttttcccctaaatgttaagcttgtaatgattctgtgatgctgcagaattacagcattacttgtagacttagtagcatatagcaaaaaatttatcttaaatttactcctgtgtttcttcgtaggaggaataaacagtgaatgggaaccagtatttttcaaaaatttttttggttaatgaagaactaggtattacgatttctttgtctgatatctaatactttgtttcaggcaataaagaacaatgccatatgccttaccaggtagatttttatataaatgattgcttatgaattgtaaatgatatgagttgggtttagaggtttagattttaatgaatgatgctaaattgatgttgaaattgtagagggttgtttgttttgtttttaaaaattggggctggacacggtggctcatgtctgtaatcccagcactttgggaggctgaggtgggtggatccatgaggtcaggagttcgagaccagcctggccaacatggtgaaaccctatctctactaaaaatacaaaaattagctgggcggggtggtgggcacctgtaatcccagctactcggggctgaggaaggagaattgcttgagcccaggaggtggaggttgcagtaagctgagattgcgccactgcgctccagcctgggcgacagagcaagactccgtctaaaaaaaaaaaaaaagtactaaagccacctttgttgctttctttttttgttgttgtcgagacagggtcttgccctgctgcccaggctggaatgcagtggcatgatgatggctcactacagccttggcctcccaggctgaagtgattgccctgccttaagcctcccaggtgcttatttttaaattttttttgtagaaatggggtctgtgttgccctagctcacttttcttactaatacacttggagtgacttaaattgtgtgtattctgcagcttcttaggtttgtgtttagtttattgaatgtgggagtgttcatttgttaatgcctaagtgagatttgatactgtctatacagcaaggtgtaataattacattttcttgtatgcagttgtgtggatatgaaccagttaaattgttgagttctctattgcagattagtccaacacaaagcaaggctttttggtatcattgggaaaaactaaagggaatttgtcgtgggcagttttattagcaaagggaaacttctttacattttactgtaaaatcacacagtcctggtaccctgtcatatacctgtcatgtgggctaacagtttgatgttgaagaactgttgtcagttactagattgtaaagtgcctcatccagagaataggtatgaaacttcccataattcagtttccaaccctgatagtgagtgctttactaggtacagtaattcataagtttattttgatgaacctgggtgcttggcaaaataggaatagcatgcatttctactgatgtgtgcctttggtgaggaaagttgagtttctatacttgagcataaggagtcttgggaattctttccttggccatttataaagttactgtgactatgtatcttttagtatgaaatggataaagaaatctacattctatttttaataatagctttattgagatctaattcacataacagtttacccacttaaagagtacaattcaatagtttttagtgtatttgcaagagtttgggcaactatcaccacaattttcatttttatcatccctaaagaaatctactaccagtcactccccattcttcccatatctccctaacctgcatttactctctgtgtttatggatttgcctgttgtgaacattttgtataaatggtatcattttacaatatgtgatctcctttgactggcttctttgacttagcataacattttcgaggtttattcccgtggtagcatgtatcagtatcattcctttttattaccaattaatatgccattgtatggaaatagtatattttatccatttatcagttgattttaaataatttcaaaacctccccacatttcaaaattattgctgttattaataatgttttgattattcatgtatagtttttttatgtgcatatatgtatgtttcatttctcttggtttgggtatatacctaggaatgaaatggcttgggccataagaactgtttgttcgaccttttgaggaactgtcaaactgctgaaaagtggctgcaccattttacattcctaccatgaaaggtatgagtattctcatctctctacaaccttgatgacacttgttattgtcttgtttattttagccgttctagtgggtgtgaagtggtatcactgtaattttgttttccatttttctgatgctaaataatgttaagcatctttttatatgcttattggctatttgtatatcttctttggagagatatctactcagatccttcgccctttttttttcttttcctttttttttttttttgagatggagtttcactcttttgcaatggcacaacttcagctcggattcaagtgattctcctgcctcagcctcccaagtagctgggattacaggcatgcaccactatgcccagctaatttttttttatttttagtagagacagggtttcaccatgttggccaggctggtcttgaactcctgacatcaggtagtctgcctgcctcagcctcccaaagtgctgggattacaggcatgagccactgtgcccggctctttttttttcttttctttttttgaaatggagtcttgctctgtcgctcaggctgtagtacaatggcactatctcagctcactgcaacctccgcctcccgggctcaagagatattcgtgcctcagcctcccaagtagctaggattacgggtgcccaccaccacccctggctaatttttgtgtttttagtggagatggggttttgccatgttgtccaggctggtctcgaactccggggctcaagtggtccctttgcccattgttaaattgtgttatttgtccttttagtactgagttttaagaattcttcatatattctaggtactaatcccttatatatatgatttacaaataattgctcccattctgtggggtttttgtgttttgtttttgagacggagtctcgctgtgtcacccaggctggagtgcagtggcgtgatactggctcactgctacctctgcctcccaggttcaagctattctcctgtctcagcctcctgagtagctgggactacaggcatgtgccaccacacctggctaattttttgtatttttagtagagatggggtttcactgtgttagccaggatggtctccatctcctgacctcgtgatccacctgccatggcctcccaaagtgctgggattacagtcatgagccaccatgccctgctgggttttttcattttttttggaggtagtgtcctatttttttaaaatttgtggtaaaatatacataaaatacactatcttaaccgttttaaaacgtactgttccgtgacattaagtactttcattttgttatgccaacccattgtaatcaccatccatcttcagaactcttttcatcttgcaaaactgtaactttgtgtctgttaaacaataacttcgcatttcctccttcttcaggcttttgacagccaccattctactttctgtctctatgaatttgactactttaggtcctttataggagtggaatcctattttgtgactggtttatttcacttagcacaatgtcttcaaggtccatccatgttgtaacttgtgtcctactctattctatgtatatatcacattttgtttatccattcatccctcaatggacaccttttgggtgttgtgaatagtactgctgtgaatatggatgtacaaacggtggtgtcctttgaagcaaaaatgttcttaattttgatgaagtccaaagtatctatttttttttcttttgtagcttgtgcttttggtgtcatgtctaagaaaccattgcctaatccaagatcggaaagatttatccctatgttttcttctaagagtttaatgtattagttcttacatttaggtctttgattcttttgagttgattttggtatatgccatgaggtcacagtcatagtttatggaatgcggccctaaacttaagctctagttgttggtctgctttggttatgctgaaaagttgcagcataaatacttttcgcagggatccctcctccacaatgctgccactccaccctgcaggactctaagtccagcctctcttggccctgaatgattgagaactctggaacaaagaccttggcaataatgtttttatatccatttcatttttcctcattggtcataacggctttattctttctcacttatccaccccacaacataatttatgttaggtggaaaattgcccctaactttagtaagcctctttggggtgggaaaatcctcacctgtatggaggcattgccccttgattcttggtttctgaaccacattcctgcagagtggtgccctgcgggaatcttggtattatactttaaggcaacttccttcccatttaagaaattaaaaagatttagacaaagaaaaatgacagagtggtgttgaggagtggtgttggcaaagcttgtagtcttcacagtatgggaagggaaaaatagttttaggctctttccctatttgccaggccagtcattaagtgacaagcttttcctggtttttccttttttttttttgagaagttttgctcccacgcccagtctggagtgcagtggcgcgatctcggcccaccccaacctccacctcttgggttcaagcaattatcctgcctcagccttccgagtagctgggattacaggcgcgcgccactgcacctggctacatttttgtatttttagtggacacggggtttcaccatgttggccaggctggtcttcaactcctgacctcaggtaatctgccaccttggcctcccagcatgctaggattacaggcgtgagctactgcaccaggctggtttttccatgttgacaaatgatttttgcttttcagtgggaacaaaaagaagaacaaaagcaaacagccccagactgtttagaaggatccccttggcttgccctgtgtgtaaacgacaccgagattttctgtataatcagagattctcaagagtttcagttccccttgctgtttaaattagcaggacttgaattcctagaacaaatatgcctagcattgtggcaggactggagttcctggtttagctacttatattttaaacctccttcccttattttttggacatagaaaggtagaagatataatactatcaatttttttgaagtggtgggcattattttgtaaattaaaaatgttagatgtaatgtagttaaaggttcttatcacttgactgctgagcacaagaaaagcccaaaccaggctacttgttgtaggtcctctggtttcagaatgatttatgctcactttactagcacatatttagttgccttgaaccttctcaactgtagcttcctcttacagaacacagtgccccacaaggagactttgaatctgtgatctcctcccaggttttagccgaagcccacaacccactgagcatgtgaagcaagggccattggtggatgggtcttatgtccatatgcaggttgaatattcctaatctgaaaatctaaaatcctaaatgctccaaaatctgaaacttcttgagtggcaacatgatgctcaaaggaaatgctcagtggagggttttggatttttggattagggatgcttaactggtaagtttaatgcaaatgttccaaaatctgaaaaaatccaaagtccaaaatgcttctggttccaatcattttggataagggatagtcagtctgcacttgatatacctctagaggctgtgaaatcttaggcagttcaaaagtcatgttgtttggctgggtgcagtggctcacgcctgtaatcccagcaccttgggaggccgaggcgggcagatcacctgaggttgggagttcgagaccagcctgaccaacatggagaaaccccatctctactaaaaatacaaaattagctgggcgtggtggcgcatgcctgtaatcccagctactcgggaggctgaggcaggagaatagcttgaacccgggaggcggaggttgcagtgggccgagattgcaccactgcactccagcctgggcaacaagagtgaaactctgtctgaaaaaaaaaaaaaaagtcatgttgttttaactattcattgccatttgttggttgggcctcttcaaccattgtgatccaatcctagttcaatcccttgttgaattcaagtattgaggtcttaggatgaatgaacaaggctttgggctggcacataaaggtgggacacccacaggtcctgctctttgggagtttgggtaagtgtattttattcccgagatgcacttgtaaaaatatacatggtaggccataggtggtctcacagtttgtctgtagtagtacagttactgtttgattcaggggagtgagaggtgagtctgtttcagagcaggtgcctgggggacaacctggagaggaaggttgagcctgcagggctttggatgtgtgaaggtaatgattcccagtagtgttttgtattatttcaaagtacttctataccattgttacctcccaccaggtctcatctgcttctgtcagtaggttggccatgtccccatttcacagatgaggaaacttggctttgagagtgtggcttggtgcaactgagatttgggtctagatcgtatgagtcgattccactatacattttctaggaagtggtagtagcgtgaacaaaaaagctgaagaggacggactcaggtagcatggtgagttctttgggactggggaggggaagggtgaaaagtgcagaaagggatgagggggttgtacagtgacaaggtttgtccagacaagttgcgagagtgcccgggaagactgaaaccctcacggggtgtgtgtgtgtgtgtgtgtgtgtgtgtgtgtgtaaacagctcttttgaggaatagctgatgtataatctgcacatatttagaatgtacagtttggtaagttttgacatgggtatgcttgtgaaacatcaccacgctcgagaacgaacattattcatcaccctgaaaagtttactcctgcccccaagaagggctttttaaaaaaaattttttattttgaaattttttcaagtggtaagtttgaagaataaaaaaaaacttttatgtacccgttacccagattcaccagtttttgacattttgataatttgcttgcatcctttatgtatgtatatatgtatacatgtgtatatgtctgtatttgtaggtacatagatttgtgcacacacacacggttcccctgccaacccagtcaagggtagcttttatgagtgatgctgctgtattccttaatgcttcaatgtgtatttccagagaacaagaatagtctattatggatctgtagtacagcattcacattcaggaaagttactgttgtttgtttgtttttttttttttttagccggagtatcactctgttgcccaggctggagtgcaatggcgcgatcttggctcactgcaacctctgcctcccgggttcaagcgattctcctgtctcagcttcccgagtagctgggattacagacgcctgccaccatgcctggctaattttggtgtttttagtagagatggggtttcaccatgctggccaggctggtctcgaactcccgacctcagatgacctgcccaccttggcttcccaaagtgctgggattacaggcatgagccaccacgcttggccaggaaagttattgttaatacagtattttttatttcatgttccagttttgtcagtctcctaataatctccttagtagcaaggacatttttctcctcatacagaatccagtacagggttatacagtgcatttgagcattacctttcttgagttacctttgctttgaacatttcctcagcatttctcagtctttcatgccattgacaccttggaagaagccagaccaactatttttaaagtgtccaagggttttgaggttttagcaggtgtgtgaatgtgatctatctgggtttgggaaaaatgaacagttgtgagtgaggtggatacaggtggtggggaggaagttggaggcagtggactttgtgctctgattcccacaggcttaggttggtggaagccgtggttgggggaattgttggtaaaattgcttggatagggatggacctggaaaagaagcaaaggtgattgcagtgttctaatgcttgtgttctggaaaattaaataaagagcagggaggtttaaagataaaactgggaaagggctgttgtatgtccaggaattgttatgcatacatttcttctttctgcacactgtgatagccctgatggtaactacttagaaaaaggttgtgaaattttaggagtttgggacccagtggccagactgaaattcagtgcatgtagggcagttgccaataaagtcacccttgggtacttgttcatagctttagatggaggaatgtttgttctctagctttaaggaattgagactggtatcatcggggcagtgtctgatggacctagtttagggaagttcatgggccagtgtctttgcaagtgaaactaggcatctttccccaatgagagagcatatggagacgttcactttaaggacgggttttgaaaggggaggtattggtggaacttaccaactttgttatgtagcctagttatcatttctgtaggtgtgtaacagtttatcaagtgcaaggagttacctctgaatcttctatataggaaagaaaatttaggcatgtttagtaacatgcagtaacctctggaatgcaaaaatgcatctatactttcttttatgaagtctgactagagaacatttcagtgtggggcatgagctgtctcaccagcaggacagctttagaggtcattaggctttcagtgttgtaaactgtttatcacttattttaaaacatcacaactgcctgagaccagtgccttacttggttgctttgtcaggagacttgtgaatattgaatccttttaagcttttacaatgttttgagaagtggaattagttaaaaatatatcctcttatcagaatgtctgctggctaggatttgttattctgttgttctatttaaatagaatatgtcatatattagatgttttcttaaatagccttaggttttaaataaaaagtaaggctgggcatggtggttcacacctgtaatcccagcactttgggaggctgaggtgggaggttggcttgatccaggagttcatgaccagcctgggcaacatagcaagaccttgactcaaaaaataaataaaataagataaaataaaatgtagtgaagacaaagatgactttatcctggtccctggtcagggacctggttcataatttaaaactcttttgtttgaatttaagaatctataaagtaggattgataaactatactgccttggattgcttttgaaaatgtgtgtgccaaggcctgctttcacatggtaagaggaaagtcattacctatcatatgccatgttttcctctgacttatacctaaaatattttagagtgcttattgccttatgtaaaattacaagatcatataatcacattcccaccctgtggaaaattaaactttttttttttttttaaagtgaaagcaagtttattaaaataaaggaataaagaatgactactccaaaggcagagcagcctagactctctttgtaattgagtctaagctaataacggattattgtaaaaaaaacctctgttttatagcagaattttctaccgggccacatacgaattttctgctcttgctgtcttcagtgttaacagtgggaaattgtggacacttaaactgagcagtacttagaatttgctggatatgctgaaaagtaatccatcagcattggagaccacaagcagtataaaattgttgatacccatatttatttttattttctttaggtggagaaagagacccttgagttagagtttttggatgatgaatttagtactcaatcattagtatatttgtgcatgtcatattctaggtcacaataaattatcaacatgccacatttgtggtagttagataatgcttttatttcctcttttttccccacgttgaatccagattaacataatatgttaatttgtgtttttctcaactgagtgtggtaattccattgcattaaagtgttagggacttttgtcttcactaataatccacttaatctctcacaataaaaagtactttcatttctactgacttacatttatccaatcaaaactttttatattactagactttttgttacttttacctagcatccaaaaccatgttttatgattggttggcaaagagctgtagaaaacagattttaatattgcaatgtatattgttaaattttctatctgatggatttccagaaatattctgtgttatatacataaaaaactatatgcataattcccagtgagacagttattttcattactcgaaatactctccttgaaaattgtaattccatgttccattacatgcttaccaaaaatgattccaggttgggggagtggttgattccatatactctcaaaatttccaaaaaaataatttgagtggacttgataaactttaaaaagtattaaattcctatgcagtgtcatctgtcacctccccccgccaagttgcctggctagctaccatttagtttatgatgagatgagtgctctggccctggggttcccaccccaccccctttagtcagagtgctgttcttatcatgtggtatgaatcagaactgatcacttacaacacatgttataagtgattggatgagataggcaagcacaatttttagatgttataaagcaaagcattgctgcaatttctgggtaagttttcatgaaactcctgtagtaacatatttctctttgctcttaggaatgtcctgagtgatcttttttttttttttttttttttaagcagtattagtttttaagagctttgatcacattcctggcctgttttctgttggtggtactatcaggctatgagatgataatagtccccaggtgcatgaaatcttagaattgggattaggccacatatctccttttggcttcttctgcagagggtcgtctaggctttgtttatctccagagattaggagtcttttatttcttatttttatttattgagacaatctcatgctgtcacccaggctgaagagcagtggtttgatcacagctcattacagcctcaaactcctgggctcaagccatcctcccacctcagcttcccaagtagctgggactacaggcgtgcgccaccgtgcctggctaattaaaaaaaaaaaaaatttttttttttttttttaagagatggtgtctcactttgttgcccaggctggtctcaaactcctcctgcctcagcttcccaaagtgttgggattacaggcgtgagccaccatgcctggcctggggaacttcttgaccatggtccccagaactggacccctttctcattatgggatgcgctctgatttatcaatgtccttcttaaagtgtgttaataaagaactcatctagttctccagatatagtgtggccagttttgagtgtagtgagactttaatttcctgtgatctggaaattgtacatttgttaatgcagcctaagactaccacacctttttgtcacttacagtggttcatatgacacagtcagcaaacatttctgtgcctgcctccaaacacatttccccattaaaaagaaaaaaaactgttgaacttccaattttatgttgattttcaaacccagcattctaacttgtcagtgtaatttaattctgttgttgattttattgcttattttatttcttgttgttggcaagtttaccgatctgtcttctgggttgtcgtgtgatacacacagacgtaaatgcagaggaaaaaagttgattttcataatagtcagcaacagtaataactaatgccccacacggacccccgtgtcacttttggaaaaaaaaagcctgtgttcatagagcagccttaccaagggataaatgttttatggcctggagcgaaatgcatctcaatataatggctgtgttattttttagaagccagttttgtttttctttcccctttaactgtattccttttttttttttaaacattcccattggataacttagagaaaggtgaataaatgcaaatcaggtggttttgttttgatttaatagtacctttgataaaaggaattgattctgctgagaatttggctgtataagtgtgttgccatagcagacttgcagtcatgaaatgattggcatgggcttaaacctttgaatcacaccctggaagcagataataccttaaggaatctcttgtctggagttgtttcttacttacagagcaggacactcttcttcttccacgcttacttatagtgatccttagggaatgagcaaaataggagtaaacttggaaaataatttttaggggattggaatctgaggaataatgataaaaaatagtttaactttgaaaaaccattttatgccaggcatagagctgtgtgttttctgtgtactatctcatcatgacaagcctgaagcaagtcattattggccccattttgcacaggctcaggcaatggtggaattatgtcaagcaggcaggaggcttggtgatttttgtttggattttctttggcttgggaaagacagatttgccttttgctagaaaagaaactccttcagtgagctatcatttcaaagttgatgtctcagaatgttgtggagatgcagccagttcacctgaaggtagtggtggtggttaaataaacatctctgtaagtctagctcttcctacagttgtgaaatctgagattttttggtttgtttgttttaatgtttattggtagaaatagatcatcaatgcatactttgtatttatataaactgcattctcttaaaggtttttgttttcattggaaatatttagcctccaagtgaacttaaagtattatctatgcaatcgattctttatagactttttttagattttaacactaaatttgagaaaccatgcatattgtataccttatttaataatccaaagaattgtttgcactttcaaaaaagttacagaaaggctgaacacaagttaaataacctgtatgtcctaaattttccattactgaataaatacttgttcagtattatatattgcttgctttctaataagtcagattgtcagagatgtttcagtaaattatctctatattaaaattatatccgaatcccttttctctctgagatgatcttgccagtattaaacattgtgccatacgcagtattagcccaaaagcttaaataagaaccaaacttgtacactgaatattttaaccttagaattatataactatacatatatgatatgctgtatattaaatttaacatttcaaataacatgtatagcacacattcagccacatactctcatgaaaaggtattattcgtaaaaagttaatgaaaagcttatttagatagaaatgtctagacataaatactaagcctatgaaacttgaaagtaaagtctgctgtgctattaaggaaaagaagattggtttttaacctattgaattgtgcagatacaaaagtgcttagcatgagaaaattaccaaaataaaaacattttagaggttatttggttctagcaatgttaattattttgtgtttctggataatttaatgtttgtattttaaatgttatataaatttcctctttataacaagttttaaaaagcacgcaaaaatagttcaaactatatataatctgttatttttcatcctagttagctcatcacaagtaactcagcaaaacaatgcttgaacattcagttctactaaaatacaatatttgagtagatcccatcacttttacccattgtttgctatgttggaccctaaaacaggctgctgacagatcggacaagtgaaattctctgagagccatcggtcagtacaatgaatatgaaattcatgcctgcaaggtaattgcctgagcttgtttccagttatgtggtcactgatacaaacactacagattttacctggttcactatcaatactgttatgctctagcgctgggtggaaagattgtcagtctgctctttggttaaatcatgtattcaggcgggcgtggtggctcttgcctgtaatcctagcactttgggaggccgaggcaggcggatcacctgaggtcaggagttgaagaccagcctggccaacatggtgaaaccccatgtctactaaaatacaaaaatcagccaggcatgatggcgggttcctgtaatcccagctactcgggaggctgagatgggagaatagcttgaacccgggagacggtgattgcagtgagccaagatcgcaccactgcactccagcctgggtggctgagtgagactccatctcaaaaaaaaaaaaaaaaagcaaggggaagaatagtagttttccagtttgactaaatcatttgaattttgcaactacatgctacccctattgtcactgtttcaggtatgaggctgggtggtctcatttacaccatgcatttcagtgctgtctccttgggcctgcctgtcccgttccctgtgctggctgctgtcagtaactgtacctaaggttactcagttctcaatgcatctctggtaaatgctgaccatttctctgaagctctgacttggagaaccagagcttctctctagtggttgaaccctcccttagagtactagattctccagacccagtcataatctgccttaagattgaccgaagagccactgatgatggctcaacaagctcgttctcagaaatcctaggaagaattatggtactaacataggtttgaatacgtgaccgctctaaacgagaaatgattcggcagaagcccccactattgctttgaatagtgactgtatgttctgttagccctactctggatgagttctgtttgcaatactgtcctgatctctattttctccgggatggatccttctcacttgaaggtccagtgtgattgttggatgtcgtagtacagcagttgaggatctgctggattcttcttctactgttattcttgacataagtcttgaattagagaatggggtatatgcagtacctctgtgttctctatcttgctctaaaaagacttgagttatacctctcctcctgacagatcttctagtggtttgctgtactggtctactttccctttgtgaattatgacaaacagtgccactgtgtctctgaattggtgaacagcttcggctacttatagtagatcttattggccctaatctttggtttgtatttctcactgtaacattatatctagccccattttcccaaacatgtgctgctttaaactgttgtgcctccctttgcctgagttagctgccacccgactggtttgtgtgactactgaaattagtgcgtgaagcactagctctgggaatgccagctgatcccccagttccattttttaatcttcctactgttgagaaagatccttcagctgaatttttcccccttgaagcaagcctagtccttagaatgttggaactaccaccattgaaattcactgaggtttggcttcttgttcgcctagccacaggactagatgacctttgttgcctatttgtaatatgatctctgttactatctgaaagtggaatgtttgtataatctccatgaatttcagatcctctattttcatgatttatgtggatttccaaactaaaccgaaactctccactgttcgagtttgttcgactcacagctctccaattttgattcccattttgtccactttgagttgcatttcctgtgccccgaaaggtgttcaactatgctagaagagaatattcatttgaactttctctggggacttctgagtctctgtaatttgttccatttctttatttcattttatttttttgagatggagtttcactcttgctgcctaggctggagtgcaatggcatgatctcggctcactgcaaactccgcctcccagattcaagcgattctcctgcctcagcctcctgagtagctgggattaggtattacaggcatgtgccaccacacccggctaattttttatatctgtttagtagagatggggtttcaccatgttggccaggctggtcttgaactccagacctcgtgatccacccactcagcctcccaaagtgctgggattacaggcatgagtcacggtgtccggccagtttgttccatttctcgagtcaggctgagatgctagttgtttgttgaccccatctaaccactgttgcagttcttctgatgttatttctctaggggagcctaaaagattatggtcctctcataagccgataatcttcatcgagttctcaggcctcttctctgtggagatgctcttgctgccatcttctcccattttcacaaatgattacggtcttgagataaggtttcgtcaccaccaccatctgatctagatctagactgattcatcctgagattcctggctttcttattttcctttcaatatgcttttaacatatgccatggtatccatccttcaattgtttgtgcctttttggagagctgtccatctcttcccaactcaaatccaggcctgttggtcttcagggttcttagttttaactactgtactgttcttggtttcataactctgctgttcagtaaaataacaattattgtcctctctgccctcatcactcggcttagccaaatcatccaccagaatacaatcccgttctgtggaacagctcttgggagcttggaagaagaaagatgagtgggtattttagtatgaattggtggtattctacatgtatatttaaagttttcagggccaggtgtcatggctcatgcctataatcccagctcttggaggggagtgtagggtgagatgggtggatctcttgagtccaggagtttgaaaccatcctgggcaacatggtgaaaccccttctctacaaaaattagcagggtgtgtggcgtatgcctgttgtcccagctactctggatgctgaggtgggaggatcacttgagcctgggaggcggggttgcagtgagctgagattgcgccactgcactccagcctgggtgacagagctgggaccgtgtctcaccaaaaaaaaataaaaagttttcaggtcttgcagtacgctggaagaaatatctagaacggcagatgatgtgattttggcaagcgtgtcacatgttgatttctgttttgccggtgaatgcatcaggcctgaggtatgtgtgggatctggacttctccatttcttgtttctgatcacctgaggcttgcactctggagcttttccttccttgtcttcagagaatttccagtgtgatacatctcatttgttgtattacaaacaatgtacagaacacttaatgctttcattggttaggaatctctgaaattaaaaaggaaatatcatgttagtttttgccttcttatttattgttcaacattgttacttacatcttttttcctattttcaggtcattttttttccccccaacatgtttggtattccttctgtccacctgttccttcacccaaatatagttaggagaggagtgctgacctattaaggcgtgtgtactgtggctctgtgtctctattagatgagactgagttccttttctggctcctagatgctggggacgtattacctggtcacaagaatgtgggttctgatatgatttcccacccttctctcttttagtagtaaacattcttagtaacctttcacctttcttttttttttttttgagacggagttttgctcttgttgcccaggctggagtgcagtggcgtgaccacaacctccgcctcctgggttcaagtgattctcctgcctcagcctcccaggtagctgggattacaggcatgtgccaccacgtccggctaattttgtatttttagtagaggcgagtcttctccatgttggtcaggctggtctcgaactcctgacctcaggtgatctgtccgccttggcctcccaaagtgctgggattacaggcgtgagccactgtgcctggcctttcacctttgttattggtcaaggatagattgttccctaaactgtcatttctcttctgttatcccattagaaattcatgcagaaattaatactttggtatcgtatttaaacatatctgttcagttatttctatttcgagtgacttggatccagtagggcgggtgtgggcaggttttgtatgtattcacatgttagcataaagattctaaagcatgagggctttccattgaaaaaggagccccgagaagctcactggaagtgagttgcaatagaacgttgtttcctggttccttgctcctttctccatctgtcccttttgctctggctccggatctagactgccatgtagtgtcagtttttcttttcattccttggtctacttcaggtcttaattttattctgccttcttccctccacaccccttgcatgcagcctcacagatcaactctgtcctaagcagagaaacacaacttcgtctccctcttgtatttcagtcttattctgccctatagtagcttccgatacctccagcaataaataaaatccctcatgatggccttttcaggccactcccgctgctgctacctgtgagtttaccaatgggcttctcattcttctccacatgcgtttggccctccatggtccctcttcttctgaaatcctttttcctgtcttgttcattagatgagcatcgtctcatccttcagactcatttcctttacagaacttttcagagtacctgttttagttcttgtctttcaaattttttctctgtccttcatacatctttaaacattagtccctttgcagcgctctctgacttaattttttgttgtgtgccagggtgtgcagtgttctttttttgcgttttaattttttttttcatttaaaaagaaatcctccttactatcattcccagatattcttgtctcagctaaagatacttgtttttcattttgagtaaatattccaagtaactaaagctctttcagatttaggaagaaggcgtttttcctttcccttcctatcccacatccggtttatcagcagtgctgtcatctttatcttcaaaatatatccaggttcctttacttcttaccccttccacttccgtgtctggttcaagcccctgtagtttctctgcaggttggttgctctgtctcctaactgcttttcttacttctgtcctttcttctcttgcagcctgtactcagcaaggccagacggatcctctgctccaaacttgccctggctgcctacctccctcagcatgaaagctgaggttctcgcagcagactgcaaggctctttattacagccgagccctcctgacgtcattttcctctctttcatgtctctctggtcacttggcctcctttcacgccatgcatccttctgcctcggggctttggcaccatcccttgcctctctttggaacactcttccccagatgtctgtctggctacttccttcacctcacctcgctcactcagatgtcaccttttcaaagcagtcttccttgacctcattgttgataatcacagcctcctcacatgcccggtatatgccatgcaccatcccttctgctgtatgtatgtatgtatgtatgtatgtatgtatgtatgtatgtatgtatttgagatggagtctcactctgtcacccagagtgcagtggtgcgatcttggctcactgcaacctccacctcctgggttcaagcagttctgcctcagcttcccaagtagctgggattataggcgcgcacccccatgcccggttaaattgtatttttagtagagatggggtttcaccatgttggccagtctggtctccaactcctgacctcaggtgatccgcctgcctcggcctcccagagtgctagggttacaggcgtgagccactgcgtctggccccctctgctttatttctcatagcacttgttgccacctacccccagtgtgtattcttgtccatctcccccaccatagagcagaggctccacaaggacaagcatcctctgttttgttcattatcttgaacccacacggtggtaggtgctcagcggttgtttgctgcatgaatgtgcattttatctacctctgcattcactgtgtgcttttctgccttactggagtgatgggagtgatcattgggaacttcgggttttttgcatacccacctatgccatgtcttctggagcttggcaaagacttcctcttactgtgtacattgatttgcctcctagctacttcagcatggttttcaagataggaagggatgagcctttcaggagaaactttataacaaagtgtgttaagtaactggccttattttatacacagtttaaatccagcgggccctggatgaggatttgagaggatctctgtgctctgtagttctgtggattagcacttggctttcattgttttcttttagccctgactttctggttcacatttgtttaaatagtctaagtgtttcagaggccgaggggttggaaggctggccaccagataaggggagcatcactatccttgtgctttcttctctgcagggccaagagatcttccactgtgcactgtgagaaagttgctggcgttgttctcagtaacaaaatcttctacgtgaagatttgctgtcccctcagttccttagttttcctctttacaaaatgaaacgtcattgaccatgttttcaggctgcttgcaactccagtgaccttgagtcctgtaggtccctcttgctaagtagaatgttcagatgaattaaatatggtgccattgtgttgcagaatcacactttgaaaagaggtcctattccctgcagtgctcttgactttctgaagaggactgagctcatggtcagcatgtttcctggtggttaaacatatctagctttaaaatttccagctgctagaggagacgaagacgatgagaagcaagcacacagcaaactgtttggcttttagatgcatcctggcctggccgggtggacttgcacagaactgctggtgccaggttagttccctgggacttttccaacatttgtctctgtattgagttttgtccttattcctgaaatagagtagccactgaaatcaggaaccagaacttctggaaaatacctttggaaaccactgtgttgcatggtagaagaaaggcaactgccagtagttaaaataccgggttgagtgctagttttttcaccctttattttttctttttaaggagaggtctgatttactttcttctgtctgttaaagctcttcacaggttcttagaaaaacaagccatttaatggtaccagccgtgaggatccaacttcagttccatgaaagctgcctggtagttctggtcacagggtcctgatgggagaccgtgtaactgctgctaggcagtcagctggagggctctggtgtggctcacgcttgtgtttgttcaagtgacctgaatgtgcttcctctttggggacctgtttcaaatgcacatgctgacgccgtaatcatccactaaaccaagtgagagtcaggaaattcaaattcgtagtgcctgtgacttggccacactccctgtacacataaaacaaggtcttaaatcagagaaactaccatctagattaacactcaaactgcagatggggaccggagctgctcttggtgtgggaactgcaactttgaagttccagactttgatgtgattaacatttcagacttaaagtcctttctgtgtggtaacttttttttttttaaacaccaaactgaaaataaaaattgattagattaggggtgtcggagaagcagattgtaaagggaggagccctcttgcaaaccacatgtaactatgtcacatccttatgtgcctcaggaagagagagatgacagactagtgacctttcaccatatctcttttacttatagctgttcttacagagaccctgccctccaacacacacaccacctccaaaaagaggacacttttgactttgctatctcttattgaccaagtgataatcctgatggagagatggggtttacaggcatgaggtgttcttttttacccagatttcaaggttcaaatactggagatcatcttacagccttcttcaaattgtggctgattaaagtttaattcttcacctctgtcttgctggtgaaaggaatacgagggcagggaaagtggagtttgtgggtcattcctcttttaaaacgttgccattaaaattgtagataaaccgatacacagtagtcctcctttataggagggagatagttccaggacccacagtgagtgcctgaaactggatagtatcagaccctgtgtatactacgtttttccctatacctacatacctatgatagttatacattaggcagagtaagagattaacaacaataactaataataaaacagaccaataataacagtataatgtaataaaagatagatgaatgtggtttctctctctctcaaaatatcttactgtgttgtactgcaggtaactcaaaaaggtggaaagtgaaagctcagggaaggactactgtacatggaattgacatcaagcaaacaagaaatgttgtgcctgggatgataaaatttcttggccactgaaattgttgggccagccttctttttgaaagaaatctccttaggcatgcttgcgaacgcacgtgtgtgtatacgtacatatgtgtaacacacacacaagtctcttctgttttcttaggttaaaaacctgaggtgtcatcctgataatttcatggagaccctgtaacatttttgccatcatacatggcactttatcttcgtagctgtgtctgtgatatactgtctgcctgctgtgctctgtccatttgagctttctagaaccctgtaggagaggtggggaagcctggattttgttggggagatccaaggtctctatggcatgacagctgataaatggaagatggataactgtaacccttgagtcattgtgttttctgctggccctttcagtctactgaccttgttttcagtaggcctgtaaaaaggcagggcaaaacctagccctctagtagagtttttatttttatttttatttgtttgtttatttatttattgagacagggtctcactgtgtctcccacgctggagtgcagtggcgtgatcttggctcaacccccgcctcctgggctcaaacaaacctcccacctcagcctcctcagtggctgagactaaaggcatgcaccaccacacatggctcattttttgtattttcagtagagacggggttttgccatgttgcccagggtagttttgaactcctgggctcaagtgatccactcaacttggcctcccactgtgctgggatttacaggcgtgagccactgtgcccagcctaggttttagggtttttacattttactgttgacagtactgtagctgtgatgggaggagggaaataacagggctcgtgagagagtgctgagcaccgtcctctctcccaaacacagcttccgtgtgttttagatgtgttctttccctatcatgccatccatgtttaggggcacaagaagagtcaggtgaggagggaatgggcatttaagtccacgtgaacccctctagcagggttcccctctgcatcactgtttcaaggagatgggatagaattatggcgtaactgttttaatgtacgaaatcagcagaagcgatgaatatttttatcttcaaatttgtattacacactgaggaccttatatatgattctaaatttattggtcatatcctgaaatacacactgtgtgtacctagtaaccttgtattggttacagtggtgctgtcttaagtttgtttatttgtttgtttgttttaaataatgtctgaacccaccataggggtagcactctagcacagttttgggtaacaaataagattgcattctgacatggtgtcataaatcatatctaaaagccgtgaggtcacatagaacttgtttatgtaacagggtagaacaaaactcattgttctgagaatatattgctcactcattttatcctcagtcacgatgagttttacagcctatgtgcagtattgatgccactgaataagcatttatttttgatgaagatacaacttttctcctcacgttcagttgagagtttgcaacaagtaagactttgcattctggaatttatgtagatgtatgtgtatagatacatgtggtttttaaggcctggcaaccttaatgaatactggtagaagattttggctgtcttttaacagcattaccatgtggttgaccatttaaataagcagcagtttatcttgatgtagtgaatgcatttaattggttatcctggcaaagcagggtattcgttggttacaagcataattttctgagtttatattatttttccttctagatatttgtgagctattgtttttatagcctatattgaaacatgctttttctttttaaaatggattgtagtatagagctttgttaataaaaaaatttaaaataaaaatggtaaggcagaatgacttagttatttttatattttcctgtaaaaacagcctcagttaagtgagccacaatgagccatgatgtatttcctccatcaggatggaaaataagccatttattatttcaggtctgactcacagtgaacctgctgacactgggatgttttaaaatcataatcataaggaacaggttagggcagaaacttggacgctgggcctaggattacctgcttattacaatgttttacaacttggatgctttaggttttctggcacaatgtcctaaacctcacacactaaacacccccttgttgtacaattattgcttgctggttttagatggtgccaaatagacagatgcctcatcataattaccattttttaaaatttcactgttatagacatatataaataggttgttatctcctctcccttccctcagtacagtatgctcatgcttccacaaaaagcaccccggatgtccttagttaataaaaacgggcagctgaggagtgagggtgtggcaggtggatgcagcgtgtcctcagtgtcgcagggtacataatattaaattacatgtgattgcaaaggaaagcagttacgtcgaatacagttgtgaaaattgtcgtagggtaatagatgtgcttctttatcaatacattaaataatatttagtggcgggtcaccataattttgaggtggagatgaataaacaatattttgagtttttgacagcaactgtaatgtgaaggcatccgatttctattggtgtcaaagtcacaggtactgccaatactgtgatgtgttgcctacattcgtaattggaaaaaatgctgaattttaatgagcggctcataaaaatgtgttttttcctatccaaggtcatgaatcccttgagttctgtccatgggctccaggttaaaatcctgggccttgaggaatttttttcccccccaccctgaagaatttctttaggcgtgagtttgaatatatgcaaataaagttttccttgaagacagtgctattctactggccttggttcaaaaataggaagacatgtttaactcttgtttttatagtcaatcctaattatctacagtccagaattgaagaaattagccttcattttcctgagaaaatcacatactcctttgacatcaaaagaaggatgcactgaaacctgtattttctatggttttgagtaaacagacttacatttacaaatactcatgcataattctatacacattctaggcatattaatacagtgtagactgatataaaaaattacatcctttccaaagtaagtgtatgcctctcctttgtaaaacagaaggaagaataaagaaagcaaacaaattaaccttgtcatggcaagcagaagaaaaaagaagcagtaggctcccagtttggtattctaccctccagatgactttattgcataatatgttttgtcatccaaacgtaattttatttcaggtctactgagcttcaaaaattacaaatgataacgataattaattaaatttgagtagttttaatgacattgagctgtgtgctggaatgggaaaatggcacaattgaaggacatttacattgaatgtcattgtttaaagttaccctgatttggaggcccattaaaaataccaaaagtcattgtattttaacatttatttcagctgaaggttttaaaacagcttttaaaaatctttagtacctgcagtgaagatacacgtacccccttcccacctatctctaggatccatcatatgagctgaaaattatctttaataaattaaccatgatcatgacaaatcttactttactgctttgaaggaaaaaggaggcattttgtgacgtgacactgaaaggataacatttgttgccaccctcttatataatacctaccttaagaatcaggaaaagccttggagatgacacttcaatttgtagacaatgttcttttctgaagagaatctgaaaaaaagatagcctggagaaatcaataaaatgtaaaatagaaaaagaataaggtgattgctactttaacaacaagctaatactctgaggggttacattagtgacagacaaggagaaatatgcatttttgacttgaaggataacacattgtatcagttagcttttgctccataacaaataaccccaaaagtctcagtggcatgcaactgtatgtatttatttcttgctcacatgtatgagattccctgcagcagcctactccatgtgtctcactttgaggccttggctggaaggtgagcgactagggtaagttcttctcatggtagtgtcatgtgcaagagggcaagcctgactgtatgagtatgtttcaagtctctgccagcatcagattccctagcatcccattagccatagcatctcttgaatcaagaaggagaaaagtgtactttaccgacaagaggccatagaaatacaattaccagggagtgaagaattgggaccaataattctgtcctaccacaaatgctaaaaatgttagcagctgagggtagcttttggttatgagattatatggtggtgtcttattgcctttggcttttgtcatttcctctgccccaagaaacactagttcagtttttcatatggatgttggaccgaatgtaacacaccatgagagacatgttactaacagctgggtaagggacaagaaagagggtacgtgaattgaggtaagacttaagagatctgggttcaaaatctgtttcagcagtgtaccaattgggggaaccccaggcaattcatgtaacctgtttctgtcatgggccccttgttctgtaaaatgaagatactgggctagcccgtctccttagttctttctaccactagaattgaggtttgatttcttatctgtagataacaggtttcatttattggcacctccattctcacctttgtgttggtgtaggctcaaggcaacagaatgactttagtaggcaaatggggttaagtaaaaacattgagtgtatagagatgtattacctatgtgtacaatactaaatagtgtggagtaatgactgtcgaatgctgtgtttggggttatagaatctcccctataggctttaagctccctgataactttatttccctccctccctcccacccatctagtacagtgcctgacttatagtaaagcactctaggaacaaatggttgaaggaagaaaccccaagtgggaaattagtaggggaacaattccctagcctgaaagtgtatccaagaagaatgatgtttttctggtgcttatatttattgcctaggatggacagctttctgcttcagaggattgggagtgttcatccaagcaagattgacatagacatttgatgctgtgtccccagcattttgctaggcgctccgggtgtagcacgaggaagcatggttgcaacgccctccggtttttgtctggaagacagatgtgtaaacagaattgcactgtgccttctgtaccagaggcccaaccaaggcatagaagagccacgtgggagacatagggagatctcacttggaagaaacctgggtctggtcttgattgaggagtggggagaagttgggcagatgtgcgggcttatagagagctttctgggaagggtgaagtggcacaatattttttgggggcctaactacaaagtctgaagggaaaggcaaagtgagacaaagcttcagaggcagacagggttagatctgagagcattgcatgatatgactttggtctttacctgatagaaaaaggaagttactgaggaatttaaagcagggtcagggatgtgatgagataggaatggcaatgaggaagttggatgtgggagttgcagggacctgcaggctgcactatgacttggggaggatggagggacagcagaggggcatgagatgggctgacatctggcaagtagtgtctagtatggacaatcactcttacagccctcctcagtcgcttttggcaccctgcctctcccccagccccaccatagaaaataacatgctgtgctgtcacttaaaacccccttttcatggccgggcgcggtggcttacacctggaatcctggcattttgggaggccgaggcgggcggatcacttgaggtcaggagtttgaggccagcctggccaacatggtgaaaccccatctctactaaaaatacaaaaattagccaggtgtggtggtggcacgtgcctgtaatcccagctactcaggaggctgagacaggagaatcacttgaatctaggaggcagaggttgcagtgagctaagattgcgccactgcactccagcctgggtgacagagtgagactccatctctaaagaaaagaagaaagaaagaaaaagaaagaaagaaaccaaccaaccatgttgctggtccctgaagtagtccgttttaggctatatagctctgggtgatgagagagatatggtgtagtctgtgttgaagagtgatagaaactcagtttggaaaactgtcaacttgataggtttaaaaccaccttggtcactaaagtggtggaggttattttgagcttcaatttttacatttgctttatcttgctagataacatttggaaaaattgttattctacagtattttggttaagtagaacaagcctttcagtaaattccactacattattgttataattttttttttgtcatcccagattagttgatatttgcattattacttggtcgatgtacgttttctagattattaggctcatacctactacttttcaatacttgtcagctgataagaggtatctcttagtggttagtgtcagcagcattactggtataatttgtggccttctttcacacactagttttccacacctccaagcaggttcagggcttacgtagctactgattcatacgtactgctggcaactgactagagaggtggaaaagggagtaccttgggggtttaggggctagaaaaggtcaccattgggttggaaccaggaaaaaacagagtgcacgcctatgatgagcactgtagtttaggtagaatttcaacaggctgaggctgtatttttgggccagattgagaggagattcagggggaggagcagcctggacaaaggggaggaattgagaagtacagtgtggttggattcgtgtgattggagttaaggctggagaattgggagccatgtccccatcatttctttttgagagtagggagctatcgagtaggaaatgtgtgtgtgtaatgctgacggtaatactgttaggttaaagttttaagcaccaactgtgagcgctggggtgcttagtgttgtaacagagcatctccaggtactctggaattctctcaaaatatcctggaattttccttgatcaggaaaaaaaatgatatggtcgagcagtgaattttaagaattttatttttctatttatttacttctataaacatttgttagtaactgtgttttattatagagttgcccacgcagtgtgtggttttggtgactaaaaatgaggattggatgaccattgactaaaaatatatatttatatgtattttatatatatcaacatatacatatatatgatatattcaggtttttaaaagtaaatgataaagaacatcactaattttattttatttttagtaaatcagtaaatcaaatatgtaccagtttttaaattctggaaacaaagattccaggtttctatagcgtttaacaaattattattcatagcaaaatctgcattcctgaggctgggaactagaggaaagggtttgtgtctaataggaaccaattgaattttagaaaggatgttaacatatagctgttttactgtctataatgttaaatgaatacacttttggcctctgtctagaaaaaaataacatcttaatctagtgtgtgattcttatacataagactttttagggatgacagtaatatttacaaataggtaaaaaaatatagagttgtctggtttagactcctgttgtcatggcatgtttaaagaagaaagcttccagccgagaaaggcttgtgatgaagtagcatcacctttcagttagttctctgtagtatagattatgtgtatgtgtctgcctggtcatagatgctggtagctaggtgtccttgcctgatgccaatatgattctgggctgaatgcatatgaatccattctaatataagtgtaaatagcacatgggaagataaacctaccaagagaaccacatacagatcatatggtttattccagaggcaagaatgataaaaaaaaaaaaagatctgacaccagactaattatgagatagttgagtgcactcagtcatatgtatgctttaaataacatgtaggtacatgcacatacatatacagtatcactatctagatttttcaaaagattgacttgtaagaacaagtgacacacatttaaagtgttaatagtgcttctaggtggcatgtcttgtcttcttttttttttttccttagtggaaattgcaaaatttaggctaattctgtcacattcaatataaatcacacagttaaaaagccactctgtagttttcccagtctttgccccattttggcacataattgttcgggataaatttctgtggcgacaccatcatctgctccagctttctcacctgatctttgcttccccagcacaccacatcaaccccagttcttaattcccttgacaaaacacacttcatgattgtatatggcactctgactgctaaagctaagctctagtacagtagttgagttatagttttcttgaaactcagttgtgctttttcagatgtgtttgtgcagtagtaattgttttcctaagaaaaagttagttattaaatatgaatgtgaaaataattatctttaggaaaaactaagttgaaccccttgaaagacttaagctgctgataaattagttgcagtcagaccctgtaagattaggggaaaccatgaagaactctgtagttggattgatatgaaaggggttcagttggattcctcttacacttgaaagaaacccaaattgtaaatctgtggtgacaatatactgtgggtttagggtttataagaaagaatggaagcctagccagagtatcttggttcaaaggtttgctgtacctcaagcacagtttcctgtatatttttaaggcaaatgtttaaggaatacatatatatgtacacacacacatgtacagacacacacacatatataaggtatacatactttttatttataatatatgtatatatttaaaatcctgtgctttaactcaacctttttttttttttttttttttggattcatctgccaactagggtctccatctggtttggattggattgagattggataacacctttccacctaatagcagcattaagagcattgactgccaaaagccatagctaacctactttctttaggatacatattgtttctcctcattaccctgtaataaaataagatttatcttaagcatgtcctgagagaagcctaaaatggaaatacacggtacaggcatcgtaagctgggagagacctgaaggaccattggcagccccctgaattgtaactgaggaaatggctctgtcagattgagatctgcattagtggcctagttgtggagtgacgtagggagtgagtgtatgagcagagcatgtgtggtgttcattcccatccatccatcactcatcctacatgaagttgcctctggattgggaccttgaactctactaattttatggtagtgtaacttgcagaagacttaccaggtaggtgagcttggtagtatgttttgttttgttttgcatttgggaccatcttcacatgtgtcaactaagaaggatttgctgctaacctatacctaaatctctgacacaaatcctggaaaagccttaaatgattggcaggtagtgttgaaaggtgctgtatcagggttttgtaaatcatgccatctagatagaatgcattgtgttggaatgaaattaaaacaaccattttaaaaaatgtaaatgaccttgggtagaaaaacacgagcattaagctgtattagcaggtgaagataaatctctcccccttcatgtttgaaataatcttttacattgtttatgtgaatttctttctttttttcgggtacattgattatgtatcttcccccaccctccacatttaatcccctaagggatcggtattaatgagttttatgctttgaattttaaaattttcttgtcctcaaaagtgagactggggaaaaagagaaaagactttaaacattttctttgaaagcttttagttatctcatatacctattccttttgaaaatttctctgtggatagccggcttagtttcttgcaaatgactaatttaaatgccatagaacatgtttagattcactgtcacatggttgttcttgctacatttcttttgctcagattcatcttcagaaagtgagggagggggaaagcatattaagcatattattcctgcaattaaggcatagattggctacttaatttgtagttagtaaaaaactactgtgatggaactcaaaatattaataaattgagaaaaccagaatgcttgtcttttgctttagtgatgggactaaggtttacatgaatctttctatgtcatgtagtttcagctagtgcctcttggctctgaaagctatgcatatgtaatttcattattattgataacatagtacctctctagagagttctagttactgtatttttaaaatgcaaacatttgaaaatgtagatacaattctattttttaaaattaataggtctgaactgggatctttggtgatatttccatttcaaagtatttatcaaatcaagacattagtggtaaaacagtactagtacaaagatgcttaggtattgctctatatttttcaaaagaataacaaagcaagaacaacatcttttagaaacgtgtctaaaaaggtgccaatgtgaccaaaaaacccatttaatcactgagaattttaacagaaattttttaaagtattatattgcaggatcaatatttagtatattggacaattcagaagatttattcaggtttgcttggggattgagaacaaatacgtgtttaaatctgtatgtataatttaaaaatattagagaaaatttgaaaaatagggaagagtcagccatattgttttaattaaacaaaatgactgcttctgttttagcagtgcttccactttgttttctatgcgttatctttttgaagccactggttaatgtatgtataaagcttgccagcttgtttttgattaacaaagttcagtcagtgaataatgtaaaatactattaacagcataactggaaagtgacttgagcacataaaaatcacctttaagtccaaagttaaattcttgtttttatgttatttattgtttttatttagagaagagatacgtgcctcatcttaggaattctcatttaatatccttcaaagactgggctttaatgaacaaatttgtcatgtggcagaagttactgtagtctgatgaaagggaagatggctgcaaagaagagaaaacgggtggtggggggcattgaggtataataatctgtggctgtgggatggttttcgacagaccagtcatagcccagactcatgtttccaaacatacattaactgcaaaccctgatctcaggttttatgtttttccatcactttttagctttaatttgtagtagattgcttgaggaaagacccctgttgattggttgtaatcatctaagatttatgatgattaggaagtctaaataaaagtctgttagatccaatttggacataaattttgaatgcccagtttattggattgccttgaaattctaattggtaatatgcaaatcgagttagagtcttgactatcaaaatcaccttaggactaaattagacagtttggaagctccattaactctttcagagtactgaactactatttagtctacccaaacagtaatttactaagtttagcatacccagacagtaatttgcaaagtaatactttgaagatgctggaaggagttaatgaagcttctgaaatattgtgttttttgggagaatctgactcagcatttgcagtagttggagttgagaaagggcgtctttaaattttggatgcctaattggcaggaattgttgctaatgctacagtctttgatttttatcatactcctacgctcttcctgtcatgttgcagactccttttactaatctatgtgagtgccccccaaggtaaagcccctgtgcacttccgtggtgatgccttctgactggttcagcctgtcaccttgacacacacacagatggtttctggaggccgatttaattccagctatcttgttcttcacctctcgtgtccatttctctccatcttttctcctgagctttggtctaatttgtcaactcagtggggaccagttggctggctgttgccttgaacttgtcttcctctttgaaatgggtttctcctcctgaagtcatcaggttttgaatagcacttaccataattttttaggtgaggatagttttcagcgctgggtcagtgggaaaaactccagttcaactctgttgcctccacagtagagcatggagttgaagcttcttggagttttcctctttctcttcccctggttggctggaaccatttcatcatttcatacttgggtcactacactggtcttttcatcggcttgctgcctccagtttcctccttcactctgctgtgggcaagatgacacatcactttaattataacatttcacctcctgaagcatcttcagacactctgctactttgaggataaaatctaaatccttttgctgggcatcaagaccactcaccatctgaaaggcccatctttccagcttcctttcctacagattcctctaccacccctccgaggccggaggaggggcactccctccctttgaggtattttacacttttctgtgctcctagcagggcatcccttttccgtacccaccctatctagaaccactcaatgaaaaaagccaggctcacaaagacacatgccacacgattccatttgtataaatttcaataaacaaaacgaacataagtgctagtaagtgacagtacctgtgagtggtggtttcacagggtccacgtacaaaacttcgtccagctgtacacagcccatttgagcctttggctgtgtgtaaattagacctcagtaaaacagtgccaatcgtgtaaggctgtggtgaggcttaaattatatagtgtagtatataaaatgctgagggcaaggcctggcatgtgggggaaatcccatctcttttagacagaagcagtcgctctcattctgaattgtatagtagataaattcttccctgacaagactaactctgcaaacagaccttggaagctttttttttttttcagcgtgtttttcacttgacttttattgccatgttttgttcagttggtatctttggtttaatgtggatatacttgttttttttttttcttgtttatagtgtaaatttttgatcaatagaaataatggcagtagggtgtgttgtagaaagctcttaatggaataagcaattctcccttcccccaaaacattgtacatatcaaaaagaactttatcttaaaagtgtttcatacaacaaacaagatttattttcccaagtcatctagttaccagagaagcatccataaatggtacttagtaggaagacatatgactaaggaagactttcttaattgagctgtgaaaatgaaataataaaccattttgcgagatggcaaacttcagtgtatatattaatcacctggggatcttgtcagttctgatttagtaggtctgggctgaagcccaaggtcctgcatttgtaaccagctcctagtgatgccagtgctgctggcctcagaaccacactgggagtagagcagagctgggggtgtattcaggttcagagatgggacattaggaagggcaaaacaagaacttagctcataaaaaccaccccacaaatttgggtgggtagtgaccttgtgaaccacatatatgtaaatattcctgaaagaatctattcaagaaagtatcaacttgtgttttaaagttttgatgttgtgtgattttttttttgtgctagtggaaaagactggttgatttcattagtttgtttttgttcattcgtttgtttttgttccctcttgcaaataatatatcagaaatggtcatgaattcaatcagaattttagggaaagaaatttatttgtgtgaatgccccttctttaaagaaacagtaacaacatcaacagaaaagccccaaaaactgaactaaaaactaccatcctgcccatttgttactgtatttaatgcatcatacttgacaaagttgctaccctgtgccatattccacctgaagagccagtttcgccggtgttctgtctgctcacttaaccatgagtagatttccatttccctcctctgaactggggcctctttcattcgcttgttccgttttgcctatcacagtcttgacttggtagaggattttattccctgtcagtcttcaacctctgttagcctatgatttgaaactgagaaaagtccaagttggaaattgaaaacgagagcccgattctctgaggctgggaaagcctctgaggacttggcccgagcaccgcccgccaccataacaggttaacaggaagaatgtggctctgcctgccggctcctgggcacattcctttctgtttggggactgaagtactggacacacacattattaaattacttaatgaagattttgaagcacacctctaatccctttgaaaaggccctttgagctggagaagggtgtgtgggcagtgagagagaggcgccttcaccctggtgaacagggccccttagaagctcccagggtgcgagtcagcagcgttccaaggctgaccattactttctgccctgaattggcagaagagacttaggggaaagttctttctagggcaggacccttcaccgggggaagatgtagggtttaggctccaaccttgactcagcattgccatttaccattttggcacaggaccttgttgaagccatgactaagggcctccaggtggtgggctgtcctttacaggtcctgatcacagttagggatgcagctcggactgataaaaaagggccttgggctctgtcagaaatgtgtgtagttgaattacataggtgattctgataataaagatgtttttgtgttcccactaccctcttattgggaagatgtctgccttagaaaataagagaacaggctccaaggctgggtgaccaggaactcatctctggcaacaaactccaatagcctttgtctttatctgtggtaataataattataatagtcctaatacattctggggttatggtggtgattgattgagaatgtataaggaaagactagatattaaagcattaatcacgtgtaactgtctgtaaacagcggttttgtagttttttgcttttagtaaataggctcccccgtgtgatcaatactaaactgacagcaaaagagcagtccattcttattagaccatgcttggggagataagttgctgctggctcatgaaggacacattcttcttgatgtagggaggtggaatgaggatttaggcgctgtcttcctcccctttggggtagggtaccttgctgtcttttgacagaatgaggatgagaggaggtggtaggaaggcgggggaggatcagtgatgagatggcactggggacagtggagagaatggttgtgcatatgatttacggtctttcttttcagtatactacagtgcttagatgtgtatgcagaaatcaagagttatcagtgatgtttgaaaattagatgttgctggcatggaacttccgttttcattgagaacagagcgtgcttagtgacgtgtatatttagtacagtaagacagttgcagaaggatggccctgatggtgacagtgataatcctaaccctagatgctcactggctgggcacaagtacaggatctcactggaacctcactaggtatctgttgtcctccttttatagttgagaaagagaaagcttaagtaatttgcccaagatcatgtaactaataactggcagggatttgagtcaggatctccaaagctacatctcttcctaaagctagttttaaaatttcatttctcatatatggagtagcccacaaaggctgtatgcaaggtagtcttcagaaagcttacatcttcaccaaggcacatgaaactgcagaaagaagcaatgttaggcgttcctgataataattatctgcctggatgacagcagtcctgctttatggtcacagaccccagctttctgccagaacatggctcaggactcctgaaaatcatcccattcgggagcaagtgggtttaatttccttttcatgaaaggaaagattagctttcatgcaaacacttggtccatttggccatttaataagaagactgaagtctcatgttccataactttatcagcctaaaagtccctttgttgtatcataaacacataggctgaaacccctgtccttccaactcagagcaaattctgttgtattaaataaccatgccatgtactgaatgtttttacacttatttattggacttgactcctacctccttcccgcaaaaaaaaaaaaaaaaaaaattagctgacatttctacagggcctacgactaaccagagggaaagagactcacatgtcactgtttgtagccagcagtccaaattgtgaaataaacatactttgaaatgtggtcataaaatacctcctgtattttatggcccacagagaaatgacaaatgtttgaggtgatatgctcagaagagcatagaagtgatcagggtgggtcattttgttaaccgttcaaggatggagattctgtgttcaaggaatcagaggaaattgtgaatttatttgaatttctgttactgttcacttgataattttatagttgtcttagtggcccttctaacagaatatgcccctttatgaaatattaccacccctgccccgttttaccctgatttgatcattatacactgtatacatgtatcatagtgttactcagtactccataattatgtttaattatcatgtgtcagtttagataaaattgtagcatggaccattgacatcagtatcaccaggaaatctcaggcccacccccagacaatactgaacgaggatctgcgttttgacaggatagatagatccctgatgatcccttgtatgttcaagtatgagaagcactgatttttatggtactcagtccccctccaacttactggttaggcttatagaatggaggctttattctttacaaagtgtgtcaagctcttttaaagctaggctttagagaacaaaagtccaagtgtacctgtttagcatcagggctgttttgcatttctagcaaagtctgacttattaaacctcctaatcgctccatctcagttttttctgtttacgttgtatttcatttgcaatgtgaagctattaggatgttccttttgtgagggaaaaggagggatagattccatcttagttctcataaaagtataaaaatcaaaaccaaataagcatatataaagtctactgtatgctggtgcggtggctcatacctataatctcagcactttgggaggtcaaagtaggagggtcgcttgagcccagaagtttgagactagtctgggcaacatagtgagaccttgtctctagaaaaaataaaagaaattagctggcttggtggcttgcacctgtagtcctagctacttgggaggctgaggcaagaggatagcttgagcctaggagttggaagctgcaagtgagccatgattgtaccactgcattccagcctgggtgtcagagcaagaccctgtctctaaaacagaatctcctgtagatggcatggaggagagaagcccgtgtgtattatccagaaccctcgctccctgacgccttctcccctgccttcatcttgtgctctttattggagaaaagtgtgaggtgaacgcacagaaaggtgctccccactgtggcaggttgaacgtttgtttttgttaattaatgtccatgcattctgctctttcagtaactagatttaggtaacctgggcctgtttcccatcacttcctggccttgtgactgggcaaataactttgtctccctgggcctcagtttccttaaccctgaaatgaaggggttagattccagcgctttgcattctctggccagctcttgagcacctgcgactccttcctgctcttcagttcttcctccatcctggctgacttttgcttggctcccgctgcccccattggcccccttaaactccagaagagcatagaagtgatcaggtgggtctttttgttcactatccattaacttttcaaggagggagatgctgtgttcaaggagtcagaggtgaaattgtgagtttatctgattttctgttcacttgataattatatagttgacttggaagtgtttcaaactgaagatattccttaatgaaatatgacctccccactgccccatctttagggaatggcattcaccaaatcctttcaaattcagagaaattagaaaaccttggatcattttagtattaaatttagtcttaaaattgtgggtggttgtcaaatcagacctcgtctaaggggacctcattaggcagttctctataatggtgacagggtggcttaaaatgtcttaactaaatgcaaattatctcagagccaaaagttgagcacttgaaagccaatgaaatatctatttaaggagcacagaaggatgtcagagaaggatccaaagtcctgatttttttgttacattatattggggtagatttactgcaagccagaggattctttacgtaattaactcccatttgaaaaaatagcaaacaataaaactattttttttccctttacctttggtataaatagaactaagccataggttggtatgtttagtaagtaataggtattaagtaagtaatatgtattacttacattttaccatagttgaagtgtgaacttgaaatatttttaaagcacagtctacagtggtaagaacttttctttgctgcagttttagattacctaggaagaagacagtgacatcctggaatgattgtaaattggtgcttgaaaccctggaagtgaactgttttccagtggcaggatgatgtgaggttcaatacttctcccctttgagtcttagattttaaatagtctaattccaaaatatttccttaggctggacacggtggctcatgcctgtaattctagcactttgtgaggccattgtgggcggatcacttgatcccaggagttcgagaccagcctgggcaacatagggagaccctgtctctataaaaaaaaccaacaaaaattagccaggcgtggtgacatgtgcctatggtcccagctattcgggaggctgaggtggggccatcacctgagcctgggagtttgaggctgcagtaagcaatgatcacgccactgcactccaatgtgggtgacagagtgagaccctgtctcagaaacaaaacaaaacaaaaaagcccccaaaacaaaatgcttccctttattcttgaggcatagttgatgttttaatggtgttataaacataattattatcttatataggctgtgaagtgattgcttattggtttggtactagaaaccatatacctttaattatgtttgatcatgtgagacccagaaatgcctcctgtacacgcctttaccatttcttgggaagacaataggggcctgccatcactgtgaagcaataaagtgtaaaggattggaaaatagggattgggattattgaaactggaaaaagtgagggagtaatttaaattctgttttagttattaaaagtctggtttcctgactgtgctaagtattgcagaaagacaaagtgtgagacaaaatatttagatcttcaggagcttacattcaagacaaggttaacctgatgctgtagttctggttgtgttcctccaagaggcaggagaggagaattggagatattcagaacatgtttgggaggaatgtagtaatcagggcacccttctggtttaagttgtcttttctgcttcgctgctattcagaaagtgaaaagctttgttctggaactttgagatatagatgggtcttttgcttttaataatttaaggtaactccttcaaagatattgcaggtctagttcacaaaacaaattgtacagtgagctgagagcaactttctctgtcctgagttttgatgaagttgttttttttaaatcatgatcaggatacaggtcctcaattagtttgtctggaatttagtaagcggagtgctggagattggagatcagagtagcatgaagattgaataagatggggattgcacattctggtttacccagtttggaagagtaatgcataggtaatatacaggttgtgttgatgggtgaggatacagatgtcacagtttgtgagaattcaagtgtagtgatttatttcatttaatctactggcagagctctaatttacttatggagctgtagaaacaaaaaatttctaatagggctgagtgcggtggctcacgtctgtaatctcagcactttgggaggtcaaggcgggtggatcacttgaggcccggaactcgagaccagcctgaccaacatcatgagaccctgtctctactaagaatgcaaaaattagcctggcgtggtggcacacagctgtaaaaatatctcagctactcaggaggctgaggtatgagaattgcttggacctgggaggtggaggttgcagtgagccaagatcgagccacctcactctagcctgggcgatagagtgagactctgtctcaaaaaatatatatatttttagtagtttttgctatagttttatgaaagtaacaagactagtaaaattataaaacaattggcctttatggtctaaagcgttcttatttatagccacccagaatgtatcatctgctagtctccactctgctgtctgtcctttccatcatccctcttgggcgccctacctggctggcctgcccagtaagtatggcaccaggtttcctgttctgggcctctggctgctttgtacttctccattcctggaggtctctggaccttcagctgctcaaaattcaattgcaccaactttgactgaagtgcactgctgatgatccttctctttgtgagccttgcctcttccctatgagctactttctgcctagacctcctcatggtgccgtgtccagaacgtgggagccacccggctaggaaactcaacactgctgccctcctagcagtagcagcaagctacagcttgccccctttcaaggtgtttgaccctgttggatttctcattgctccccttcttgctttgtattttttttggcaggaagagtctcttttatttctgagctgatttgcagatcagaaacgatggacctctgttgaactctgaagcagtcctccctctccacttgggactgctagtcctcttgcctttggtataaaggggtcctccatctgtccccaggccccatcctccgagaggccttccagaacctgagcattgtgtttttctttttcaatactttagtaccttagaaaccagaaagtgataaatgaggagagtaggtatgaagtagaagaggattttgatggccagctcgtaaagtgtagcgttaagtgaaacattgtgatgtgaacaatttggtatttttgaaagtcctaatgctacttgtaccaggtgaaatgtttaaatctctctcaagcccctagcattttgatattcttaaaaaagaaaaaaaaagccacacagaaggcattagtccagcgtggtatgttattgaaactggaacgatattgcagcatatctccacatctcccgttgacggcaaagctgagccagtgaaacaggtgtgagcctttgagactgctgggataacccatgctgtggagatggaaaactaaacttttgagtgagttttctggtttattgggattcatccttggtatatcagcagttgtggtttcaaggttccatattttagttcttgttccacttgatggaacacttgacatctatcctcttctgtaactccgcaagaggggcatttggttaatggtcattttggaaagaaagctattttggggacagtaattgcctggagtctttatgtaagaagagaccgaagagtcttagcaaggagaaggtttctgtttgcggcatttggcccatagtatagtacacattcctgttgtgttgttttgtttgcatcattgggcttagatgttattagatattactagtctaatccaattccttgttcttggagaataggtttcttgtttatctgaatggcttttctttgcgtcactatgccagaatagtcattcttggacagaaatgatggttttaaaatctctcttacattttaagacctgctctaggggttgtaaaatagtactgctgttattgggaggagttgggtaggggccacagcagcagggagagagaggctcccatcgtacaaacttgcagacttttattaaaacgtatttattgattgcaaattatgtcaacagagtgaggctttggtaactcttcaagttactagtgtttccttctttgcatagttgtttcccatcaccctttaaacatctgctgcttctggtcttgtccagtcatgcttgagtgatcagccccagaagtctgacagctcttcctgtcttgactcaggacagtccaggacagctgagctccctgcactgaaacaatgggactcctgaaaactgctctgctgttgacatgagaagcacatttcctctttcttaacttccagaaagttactgtggtggctttgaaatttgttctgaaacaataagctcaaaggattctgttaatctattctgattaatttaggaggcagcagcattcattatttgacttatgttagtggttaattaaccaaagtagaacatgttcactttttataaattaaatgctgatagagtaacaaagacgaaatattttacaacacagatccttgaatttgactctgaaatattctgttattttgcagcagtttccggttttagtgacacttacatactgtttctattattagcaagttttgaatttaagtaacttgaaatggatatgaaagttgtttctataaataatacagactgtactcatgtgagagttttttttctttaatttcattgttggccttgattggggagaagatttatattttatgccagtcttttcttgtttagaattggcaagaattggattgagttgtattaaactgtttatgtgaatagatagttacttttgagatgtctttgaatgtagaatattcttgcagccatttcttgatggtctgccttgactgtcttatggacagttggcatcagtgacactttcatttatttacttatttatttttttttagacagagtctcgctctgtcgcccaggctggaatgcagtcgttcgatctcaggctcactgcaacctctgcctgctggattcaagtgattcttgtgcctcagcctccaaagtagccgggattacaggcatgcaccactatgcctggctaatttttgcatttttaatagagatggggttttaccatgttggccaggctggtcttgaactcctgacttccagcaatctgcccacctcggcctcccaaagtgctgggattacaggagtgagtcatcactcctggtcaatcagtgacacttttaaatcacttgtgtccttgactctttttatgttgtctttatgagggacaggccctttattctaccaaggagacctccatagttgctcattctgaattctttcaggaagatttggttgagggttgttcattaggctggggcctctgccggggtgggttgagattagatggataacaggaaaataatcatagtgcttcccagcccctgtaagtgaggggtcttcttaggataactttttggcttggagtaaatgtcccccccaaaatcttaaactcagtttaagggtgaaaacttaaatataatttgttcctggactttgggattctgtgaacatttgtttgcttctgttagtgatggttatggagggtttaaccgcccacattttcactacctttttagcccaataaatggaaaaagaaaaggtaggcagggaattttgttccacttaaaacatcagttggcctgttcggattcaggtgactcaaggtttggtaatgaagctagagaagtcttgtgcagatacactcaaacttcctgactgtgcagttcagggaattgtaagtagagcctgagcaaggaacaccttgattgttggagaggaaaggtggaagatgagcactccctaatcctcctctactcagtttctttagggttaaatgggcatttatttaaatgtaggattctgcttgcctgaactcccaaggttctgttaattgaattgaatcctttctatcctgggcttcctcccgcaccatagcagatgtgaggatatggagcataatgcagtagtgctctgtactctgtgttatgcaatttgaaaagtgccgttctagcccgaaaatgttagtgcattgactctctttcacatgaaaggccttaaagtttacccctggaagtcaacctagggtggcacagaggcagagacccattaccaccatcaaccctctggcccttttaaaaggtggggagaggctactgtgaacactgaagacagcactttagttggatggacttcataattaatgtctcattaagtgaagacttccgtttcatttggctttccagaccattcggtagaaatgcagaggaatggagggagaacagtgcatctcagttggcaggcaggaagagcagatgtggaagaagcaacaaagattttctccaagcacttgagccgtgctttaggtatagatggactgtctttggggccatcctagtaatcaacatggttaatggcagcttctctctctgtccttgagtcttttagcaaaaataagtttttatttgactcctcaagcaagggtacccagccttggagaggagatgaaattaagataaatctttattttttcttatttgtatttgaaggggaagtttaaaactagtcatgtaaatagctgtttggcttatctggactttccagtcatttttgttttccttcctttcacggataatcaatctttcactatctgttcgtatttgcttcttattgtggtctcctgctccgccctgcccactcccactttttttttttttttttttactttgttctgagcccttctcaggcagaggaggtcaggcaggtacacgtgcctttgggaagaaggtggtggaaaaatatggaataatgagcccttctgactttggattcagcaatttaacattggtgcagtaggtggagttattcttggagtcccagtttgaagattgctgtgcagaaacccatctgtgctgctggttgccaacatttctggtacaaatattgtcatttgctcttgaggcaatctgctatttcagtcctagatgcagttttgtaatatgctgggtaaaatagcagacaaaaaatatcttaagtggtggtataatcttcagtttaaaaacactttagcaatgtttccagtagaggattgttcaacgtgtctcctttccttggctgtaaacataatctaaattcatttttcctcgtttgcctgagccacggttcccttgtgctgactttgcatgtcagtaacttccgtacccatcagagaggaaagacagaggggcagtcttgtgcaggtaaaaggtttaagtagtaacatttccttaagattgcaccctgtagaggtttagcattccatgatcattctgttgataagcaaatgagaaatgagtaacttgctcaaaagttacttggttacaaaaattgtcaaaactgatactacacactatttcccatttggtaccttttatccctacacactatttcccatttggtgccttttattccagactgcaagagtcatatcttctgtgcaggctgctgaacagcttcacaagggggtgcctctgttgcctgtgaggagtaggtgttcttgatgggattggggtctccctggaaacccggggatgggactgtgccaccattttattgggcttttgttattaagcccttcttagagagagaaagcatatcctgtaggaagtagtatgtttccttctgtttctgtggctttctcagtttcttcccatcttgatgcatagtgagaaatccattttacagtatgactcagtgcacatatgcacacaatgatagaagagttttacaaaatagtactgtgcttagccatttatgtaagactgttttgttattatttacagaaatgctagccacaatcctctcaattggtttcactattttatggattgtgatccagagttttagcctgagggctttcccacattctttcaagacctttgtgtcatggcagcagccttgaagttaggggaaacaggtagatgaatccatatatggagaattggccatatatgggaaatgaggagggagttcacaggtcagtcacttgaacacacaatgatttgggctgagccagtttttaagtagcccctctctggattggtctcaaacatggaactagttaaacttacgtactaaatcaaacagacccaaaagacaccgtttgttttttaagtcttgctggcacagactagctaggatagggtttttcatccatctggacatcttgtcgtttagcttttgtatacaacccttgaaaatgggcagctgctgggtccactttcctggatgaggtttcttgcttctttcttttgagattaacctgagtagggctcacctgaatcaattatttccgcagaagctttcatctcatgaaagcgcattccacttttcatgtcttcagggcaaatacgaattgcacttccaccctgaagtcagaactgtaaaggaattttaggtgttatcaatgtttgataagaagtgattaccctttctctgcagagctggaacagctgaagctggtgtgatctggctgggagaaggctgtgctctggaatagtgtcctttccactgagtccctgacttgcctgttggcatatggagcagtaatcttttcaaaactccattgtgaagttggctgtgtgtgtgtgtgtgtgtgtgtgtgtgtgcgcgcgcgcagaggaaatacttacatactaaaggggaaagcgggggaggaaaattccaggaaattgcaaggtgaggttgacattccttattctcttaactcttgcttctgtttttctttctgaaaaacaatgatgacttaaaatttgatcccagaaccaactggctttttatccgtaagattacagttgtgttttttagacatcctttcataaatatctaatgaattgccttttattatttggtgttaatgaccaaaagtaccactaacatagtgtttctcatacttgcctgtcatataagatacttgttaagaatattctgggacttcatcttcctcttgttaaatcagaatctacctggaataacatagttaccttattttcttagaatagtagaactgaaaagaatcttacacatgaaagtagttcaggtgttcccaaacctggctccagtaccatgactgctttaatagattgccaagctgcgcttcatacctagtgaatcataacatccgaagcttcctagaagagtcggaccattagactggagggataactactcgcttattcggttgccttcaggaaaggggaatttatgtgcttggttattgggctgattaatagcaggacaagaaatcttattgtctctgtagattcatccaaataatatccaaatatatatataatgtttgtttgagatggggtctcactttgcccccctggctggagtgcagtggcacaatcacagctcactgcagcctcaacctacccgggctcaggtgatcctcctacctcagcctcctgaatagctaggactatagacacgtgccactgcatctggcttttttttttttttttttttttttttttttttgcattttttgtggagatagaatttctccatgttgcccaggctggtcttgaactcctgggctcaagccatatgcctaccttgacctcccaaagtgctaggattacaggtgtgagccaccatgcccagccccaaataatatttacatttcaggtactgactaggtaggtgagtgggggcagttttgagatgggtgagcaaggtctctctgccttggaggtatatgtggattgttattcagcctttctcaagggatgagttttagagagtggaattagactcacttgaggagctttttattaaaaaaaattctaatacccatataagactgcaaacttaactgataaatgtttgttctcactgctccaccaacctgccattccccatctgtctccccctcttcagggttccctatccctgagacaaaacaatattgagattaggccattaaaacccccacaatggcttctacatgttcaaataaaaggaagagtcacaccatctgatctcactcactgtaaatcaaaggctagaaatgattcagcttagtgaggaaggcatgtataaagcccagattgtccaaaagctaggcctcttatgccagtcagccaagttgtgaatgcaaagggaaagttcttgaaggaaattaaaaatgccattccagtgaacacaaattataagaaagcaaaacagccttattgctgatctggagaaagttttagtggtttgtatagaagatcaaaacagtcacaacattcctttaagccaaagccatgttcagagcaaggccgtaactcttaaattctgtgaaggttgagggaggtgaggaagctgcagaagaaaagtttgaaactagcagaggttgttggttcatgaggtgtaaggaaagaagccatctccataacatgaaagtacaaagtgaaggagcagcaagttatccagaagatgtagataagaccattgatgaaggtggccacactaaacaacagattttcaatgtagatgaagtggcattctattggaagaagatgccatctaggactttcatagctagagaggagaagttaatgccaagcttcaaagaacaggttgtgattctcttattaggggggtaatgcagctggtggcttgaagttgaagccaatgctcatggaccattcagaaaattctagtgcccttaagaagtatgctaaatcaactctatctgtgctctgtaaatggaacaacaaagcctgagcgacagcacatctgtttacagcatggcttactgaatattttaagcccacagttgagacctactgctcaggatgaaagattcaaaatattaaactgctcaatgataatgtacctcctcacacaagagctttgatggagatgtacaagcagattagtggtgttttcttgtctgctaacacaacatctgttctgcagcccatgggtcaagaaataattttgactttcaagtcttattatttaagaaatatattttattaaggcccaagttgccatagtgattcctctgatggatctgggcaaagtaaaattaaaaatcttcaagaaaggatttagcattgtagatgccattaagaaatttgtggttcatgggaggaggtcataatagcaatattaatagaaatttggaagaagctgattccagtcttcatggatgacctgggaggggttcaagatttcagaagaggaagtagatgcagatgtggtgaaaacatcaaaagaactagaattagaagtggagcctgaagatgtgattgaattgcagcaatctcatgataaaacttgaactcatgaggacttgcttcttacggatgagcaaagagagtggtttcttgagatggaatctacttctggtgaagatgctgtgaatgaacatggttgaaatgacagtaaaggctttagaatattacataaagcggtggcagggtttgagaggattgactctaattttgaaagaagttctgctgtgagtaaaatgctatcaaacagcatcacatgctacagagaaatttttcgtgaaagaaagagtcaatcaatcaggcaaatttaattgtgttgttttaagaaattaccaaagcgatcccagcttttagctaccaccaccctgatcagactgcagtaattaacattgaggcaaaggccctccagcaaccgatcacaactcgttgaaggctcagatgattattagcatattttaacaataaaagtttttaattaagatgtgtacattatttttttaaaatatggctattgcacacttaataggctacaatataatgcataccttttatgcacagggaaacaaaaatttgtttttactttattgtgatatttgctttattgtggtattctggaagtgaacttgaggtatctctaaggtaggcctgtatttcatacatgaagaaaggcatagagaccaatataattagtacccatattctacctctctgttttagctataaatataattcttcccctccttgtcccagaggtagccactaattccagagtttgtgtgttgaagggcacctttcctgccagaagcccgtaccctggctgtgctgatagatggggtccacaaattctttgtaggatcccctttttaaaaaaagctttacataaatgttatcatttaaggtaaacaccattctgtaacttgattttctttaataaaagtcagcatgatatttttgagatgtattgttcttacatgaccagatatggccccatacttaatagttaaatcaggaaattgaagccagacagcttgaaaaccttcttaatggaaaaaaatgcaagaagtgggtgggatagagtttctgttgaatttttgtatagaacattgtcatttgtgggaaactagttgatttgaattctgtgttattttgaatagcctaataacagcttaatgaggattaattgcatgttgtatggaaagttaattgttttaatttactatgggtgtagttactgcagtttggttcaaacaggtgaaagttaagatttgtagcataaaacaggaagcagatgggggctaattaaagttctgttgatgataaaaggatgactgatcaaggagcgagcagctggtttctcaatttaaacacaatttgtactattgtatgaagacagccctctgcaagttctcatgagtatctttcaaaggtgaaggcatgtgttccagcaacaagtgtgaaggctgttgtggccctgtttgtgctcgctccccttttttgccttcaagcagtgtcacttcaggtttttccaaaaaagggggttaagggatcacaaaacctggccagattttcagtgatgctctctggacacctgttgtgtcccagaaaagtctaaagctctttctgtctccaagaaaagtgcccaagcatttcatttccttttgtagtttttcttacttatctcaactccgtctcttggcaggctttccaatgttgttgccctgaccataacccaagaaggcccacatctagctagcggaagcgccgggtatttaagtgtgtaggcgaaggctaagcagtgctgtagatactttcctggagcctcaccttgttcttcagggtctttgagcttctggccatgagatgttagggacttgaacttattttgcttgattgtgtcctggatgactttcaccttcaaatgacagcatcttttgttgctactgctaatagtgattgcgtaaacattgaggacaagtgtcctctatgtgttttgcttaaggaacatgccagcactgggttttctttgaatgtgtgcagggaggtgacatgaggtcagatgaggtgtgccttgcttggagccaggggctagacatttgcttgagattttgtgcccataatatctaatatttataagtgctttgtaggattatctcattttagtccttacaaaaatgctttggaatggaagttgtttatccccattttgtagatgaggagattgaagcctggagaggtaaagtgactcagccaaggtctcacatttgctaagtgccagtactggatgtagattccaggtttgtgtgacagcaagcccacgctcctcagccactagttttgtgtaaaattgttgttctctttccccgtctcctgcttaaggaaagatatattgtttcctggaaaaacaaaaatgttagcatatagtttgcaaactacaacttattatttggttatgcaggtgtgtgtgtgttgtataaacattatatatatttcacttggatatattccacttgataggaactgctttgtttttgaatgaatatatgagaaaggaaaatgcctgggtttttgtttgttaccccaatgtagcaacattatgaaaggtaaaatgctctttctttaacagcagcagcaaaaaagacaacatgcaaaggtaatctacaaagtaaaaagccccattatattcaccacctggaagcaacattattgtattcatcaaaattgtcttgtaaaagaagtaattgaccatacagagctcgtataattggtaataaagagcaccctgtattttagttgcaaatagtgtgcaataggtttcaggggtgtcatgattgatgttcactgtcaggtgttgtaaataaactttccaatcccagatggtgtttttgcctagttaggttctacactgatcccaccacatattacactaatggggaaaccttgtgtacaggttcctcatcttccaagctctattgtggtgaccctagaaactgcctatgtgctcacatcatggctcctaacagcatgaggaggagtgtcacagccaaggctagagtgttttcctggcctgggagaagtcttaggattgtaccgcccccgccccctttttttttcattctgctgccttctcagcagtcaacttcagaatcactcttctcctgtcttctttcccccttctttgcttgttccttcctataccttgcttgtctttttacagaagcatttaaggagatggaaaagatttggcccattcttctcctgtcataactctgcctgtgtatttctgaagatgatgttgactgttggggaatgggatgtaggagaaagaggtctactgtgggtcttgcttcgcacggagtaatccgacctggcgtggattgtctggtctcctccttcatccatcaaagagtaaggcatggttcaattacttctagcagcaagtcccacagaacacctgggctttctgagctacctagggcaggtgtgttatttggtaggaagtttgggcagcactggggctttcagtgagagcccctccttctaccttggcataatcataaaatctcaccaatacgtagccctttatgctttttgaagcacttatacccattacaattctgtggggcatttaggacagacattgttttcctactttatagacaagaaagcttagacataaaggatgtaaaaatgtgtccagtcagaaagatagagccagacttagattttcttcctcattaccaccgtcttgccattagatcagcattttccaaaatgtgtgctgctgaacatcagtttcatggtatagtctgtcaagaagcgcgggcaaagaaatgtgtatgtgcgtggaggggtgtgcatgtgcatgcatgtgatcccaccaacaaaacaaaacaaagtctaagggaacagttttgctcttgtttgttttgtgttgttttgtgtactcaaggctctaaaaaactgtacagttaggaatcctgtttaattctgtgtggccagagtgtcccaaaggtattttttcagtgaattcaaatcaccctaaaaggaaccattattttgtagagcacatgccgaagaatgctttagtaggccatagtgtgctgctttgtcctgaagctactttggaggtgctacaggagacctcaatggttagaggaaaatctgatcttcagggaacttgcagggaagagtccagaggatgctgatacacagtcagtggctggggatgctttgggaataaagactgtcccgaaggtggagtgggatgggaggctggctgcagggaatctttgtcataatgtcactataagcaccatgcctccaggatttcataccgagtaggaatttaaccagaatgcacaaaagttctcaatctacaggatcagcattctaggaccagttgtcagctttgttaggtaaagctccatgaactgtagcctgagtgacagctgcagagtttattggcttagggatggacttaagaaatttggacccagtacagccagcatgctgctgcatcttggcctgaagtttgacaaggcacattccctgagtgaggccatctgcatcaacccccgctccactgccctttctttagtacttaatgttcaactttgcgtgcaattttgcttttactagatggcaattgagggaagggtggaagagaagttggtggtaaaggtgccagtcagtgggcacattctgcatccatgttcttaatcagctcttctgtcttttagcagaaatagaacttgataaaactcttttattttgaagtaagtttgttccagccaagcagaaaggataaattattttgcattgatatctgaaactaaggaagcaagtctaacctcctaagaactggtcatggatatcacccttgatctatcttttctcctcttctgttcattctgtttcattctgttatgttctgcttggctctgttctgttctaggcattgagtatagatcaaaaagttcatgtataatatttttaaatcccgacgacaaaaactttagattaatggaggtgattagtttacttagtttgggctggtgaggagaataaaatgatcctagtaggaggagtggctggaagaagtgctatgaaataggaaaagttaataacctaaggtgtggtgttcctgtctgcaggtatctgttagctatcctccataaagtggttttatgttcttctaaagtggacagagtattagactctgtgacccattctacaaaatatttgaactgtctgctaaggtttctttgtttgctagtaactgtgagttttagaccctgtcttaagttgcatggcacacacttggtttgtaacaggaaggaaaggaagcagttagaggtcagggcatctggctggtggaagaagaaaggaggatgggatctgttgagggtaaggttaacatcacataaaatgtttataatcgaattctgttgtggggagtgctcatcaaccttttaaaagttttcaagaattggaccacttgtcttctagtatgcatgtgggcggggggtaatcatgcctttcacattgaggaggaggggtgggtgggtggggggagtctgatgccactgcagcttatcctcatgcccctgcagtaccccacagccttggccctgaatctcctgtgcatccaccagggtactgactaatgcatgagtattttgttgcagctttatccatgtttgtgtggaacaatccatggttacattgtaggccattatttcctttaatttccttttagctgttcaaaacaacctgaaagatgttatagttgagcctagacaatgacatcaaggaacaaaaataaaccttcaaaatgtaagaaccaaatttttatgccaaatcttgtgaatgatggataaaatgtatgaaagcagtcagcttcatggagggagacttttaaaatctgttttcaaaacaaatggtcctggccccagcatcctgccctcctttggctatgaaaatatcagattatgccgtaagtttgaaaacaatcaagtatccttcaagtcatgagacagaagccaaagcttgaatcgaaaaccctgtcattttcagcgagggagacagggaggagggcctgaaggtaacttgtttctggaggcccttctctcagcactagctgcagcagcttcctgttaggtgggagaagcaccacagccaaggacagcagctcctggagatgcttttacttatcaagagcaatgtagatgtatgcaaaaatacagacacccactcacagttacatttgtggataatcagaaatatctttctgctttcccagcagagcccaaactctcctcctatcatccaggtgggaagacaggtttggcgctttgctctaggttctgcattataactttactctgttgtcctctgatcttccactggctgtcctgtgagttgcatgtagggtaaaaaacatgctgctgtgttaaggccccacccaccgtacctcctctctctctctcctccctttctgtgtctaaactcatacatggccatactgacctcttctcttttctccagacataccttactagtgtttttaaaaaagtttcctcacaaacactaatagctcatatttatcggacattctgcacagtggtcagtaagtactgttagtatttccttcttgcagacaagggaaccaagcccaaagatcgcaagccatttatccaagagcactcaggccgtaactgggtttgaactgggccagtctggttctagcacacatgttctgcaccaccacatagtttgtctgtcaacattggttcatgctctgccctacctcaagaattcccatcccgttttatctagcaatccaagtcgtcctttgcttcacgtcccaattccagcgtagggcctttcctttcttgttttgcgtgtgctgcaccttaacgtttctgtgttgtcagccttccgtacatatgtgtaagaccatgggaggcagggagagccttgagccttaatgcctacttgttatttccacagtatacagtaggggcttagtaaataattgttcattgaaaattacattgatcggtattgatttgaccaaatcaaaagatcctaatttatgttattgaaatgtgaatggaaataaattaacttctgaaattgtcagttgattgaaatactttacattaggtaggcccacagattttccagtgacaaaaatgaagataaaaattgatctttggtttgtattcccaataaaaataactgacacagggtcctttgagacccttcctccttggtgcccttcactccacctacccccacccctggcaagtgctctaacactgacttgggcaggatgaactggacatgttcagttccagtcctgattctctgaatggtcccttatttatttatttttgtcacccaggctagagtgcattgttgtgaacttggctcattccaggctcaacttcctgggctcaagctatcctcctgcctctgccttctgtgttgctgggactacaaatgtgcaacaccacacctaactttttgatttttttttttttaatgtagagacaggatggtctcattgtgttgcccaggctggtcttaaactcctgtgctcaagcaatcctccctcctttgcctccgaaagtgctgggattaccggtgtgagccaacatgcctggcccaaatggtccttttaaagtctatcatatatttctgtcagagacttcatgaagatagacctcaatatattggataaccattttagtcttcaaagtagctataaattaagctaggaatagcaagcaattttcgaacaaaatatttctttaaaagagttttctaggtttggctatttattatgtgtgatagattttttaaatgattaaaatgtgaaacttttctttttgggggtggtagggtaccactgaagaatgattgttttacactttgttcagtcaacagcagttctaagtcatccattgcaatcttaactaggctgtcagaatttagctaaattagttttctcagtaatcaaaatgaaaataaattgaaataccagagactacatgttggttcagagaaaagtgatctttgagagttgaaatgctgaagtaatctgttagactgaccttactgctcatctctttgttatataagtatctgtgacagtagagccaataatttctaataaaaaccttgcattttgttctagaatatcatgagtttatagaataattctcgaatatgcttgaaattggtagcattcttcacatgtataatctgttttatgttttccaaacatgttctcatttaatcttcacaatgcaccattcagttatttggtacggagacaccagggcatcatacagctcagattcacacgcgcagtaatgatctaacttggacacagacatacacgccctgacttctagtactcttcctactggaccatattggcaacttcgtagttttaagagaagtagagaaaaggcatctccaaatgtgctaatacatacattgtggtggaaaactaacagcaggtcagagtatcctttttaaaaattttttattttactttaagtcctgggatacatgtgcagagtatccttgaatagtagcttggaagagataaaaaaacgtttgtacttgtgtgcaagattctagccacaatagttgatattcagttcccttttggaggaaattgaaagtgaaaacgctgaaacaatgaggactaaaattccaaagaggagtttaaggtgtaccatcgcaaattattggcttgtgtgggagattctaattttctgttggtttgagtcatcctaaaaaatggttcatttaatcattcattccttctgcctttgctagtttgcccgaagttattaagattatctttgtgttttcatcctcaaacacaaatgtgtattgcgcatagccagtgtgttttaaaagatcaagacttttcttaaaatgatgtcgataacttccaaaggcaactgtgaggtttttttgttttgtttgtttgtttgtcgttttcttttgttttggtctttggaggtttataaagatagtcttgtcttaacgtatgacaacaatatcatccatgtttccaaaaaagacatgattcgaactgcagcattagaataaaacatttaatatttaatacaaggaacactgtccatatggtaaggtttgcttagtcattcaagtggggaccctcaggtggttcagggatcccttttttcctacctgacattctcccttctctctggagcccaaagaattcctagtgggatgtcctcaagtcatctaaatgtggttccagggcagactcaacttggagccttccagaattcctttagcccaggagtgatcttggggaagcacattcttcctgggctggcttgctttgacctgagactgcatttaagctgaaagtcctggtgggcacctctgacacagatgtgcccacatctggtggagtgccagtgactgcgcagtggtgaaagctgctctgcaggcttcttttctgctcagtgggtgctgagttttcaaacagacatgaacatgcagctctcagcacaggtgcttccactggggtggaaatttggccttacaaataagcaaaatgtaggcttcattcatgttaggtgtgtgctgatggggatgtgtggctttagtgtgggcacattgaggagggccaggaggagtcatggaggctttttaggtatgttaatgaaagcagcattactgaaacatttatgtgagctgcttttggagtccccaaacacgcctgggcttctggtgatgctgagggagcagcagtttgtgagggggaccatgtcttttgtattacttagaaggaaggtgtggacagcagggctgttgcgcagcagacctactgtgtcttagagtgtaattgtgctctgcctcctcaggtggatccctgatgtctgtgggaagctgggccacagccctgacttgggctcaatctctgtgatggtgggagtttctctttagcataaacctgggcccaaatagttttgctattattgggtcaacccatttgggaagctatttgatttgagacaacctttgaataatatttgggtggtatataaacaaacatatatattcggcagtctcgagtcgttgttgcattaggcttcctagacagagtaatgggcaagctggtgtcaagattctacgtaaaccctacaggaaaacccaacattgcaggtagtgtaattcagagtgttacactttattgcagtttgctgttgtttttgtaatctggattatcatatctaggtcccaaaatagaaaaaacacataaatctagacttggtactctgtttactaagaattcttagtaaacagactatgcgaaaaaacacataaatctagactttgtactctgtttactaagaattcttagtaaacagactatgtatccaatagataaattcttccctagattttccagatagcaaacatatttaggataaaaacagttctacgtagtacatgctatgggtgggatattgtcctagggattttaatctgtcaaagtttcagtgttcttgcttctgaatttatatccataaagtttttcactggcttctgtaaacaattcgggaacataccttgaatatacatttacctagcatgaacaggattaacaggctcatcaatgtaatgctgacaaaatactttaaaattcactttagtcctttaaaattttagaaagctttaaaatggatcaaagtattggtatggctatgctttattttatgcctaatttaaattcttcatcagaagagagtagatcctaatgcgttctttgtttttggttttaactttgttgtgccttagtcttctggtagccaaatagataaggtagttaattgcgttataatgctgtgcgtttataggaccactgcagattagaaaaattgtatggcctataaaacagacaaagattttcattaggaacagcagaattacttcagcgtcaaatgagtttcctcttaatattctcctgtggtggggccttttgcatctgagacagccattaggcggaagcagcaaaaagcatgggtattccagtagttaattcagtcgaagtttcaggaaggcccctttaggtcactgatgggcaagatgggggagttgtggctgtctgctgtggatttggcagtacctggcctctgtgcctccctggggaggagctggtgagtgggttaaagggtccccaggggtaactgcaggctgcatcaaaactaaatcaatcctaggggaaacaagctccactttgaaatccttggtagcctacagatctctttttttatttactttttttatagtactttaagttctagggtacatgtgcacaatgtgcaggcttgttacataggtatacatgtgccatgttagtgtgctgcacccatttactcgtcatttacattaggtatatctcctaatgctatccctcccccttccccccaccccatgacaggccccggtgtgtgatgttccccttccgcctacagatctcttcaaacaaggcatttagaagaattttagctagatgaaatttagtctctggatatccaccacagggaccttattagctagggttgatgacattcatttgagagctggccttgtttgggttgtgtggtatcattaaacccaagcgtatgacagtgtgagatagtttctgttttccaggctttgcttaaataggggtccacattagcacctgatacagaggggttatagaaggaaagtgattaagatgaatgccttgtgatctggagctggtgtctaaggggattgctcgtttctgcctcacctggattgttttgggatttgtctttttggggtagtttgtttctgatagtgcatagagcccatagtattgaatggtacaggagacttccatttcacttcctgaaaattaaagggctttgcccttcctttcacaaaactgtagattcctttaatacagggttctcatgtgggacacagtgaaattttgtagtgctgctttttaattactaccttctgaaatgcaaaagctttggtatggtgtaatatcattaagtacattttctgttctgtccctgaaggggttttcttcaatcctaaatgtatgaggttattggctgaaatgttactctgaaatatttagacctttggctaataaagatcagacaaaccagagaacatcctccgttgtaaagctttctgcccccggtcttgtgggctagtggtggcccccttcttccttctttgttcctcaataccgtagtcccatttacttgtaacgcacctcttttgtcctgtagtacgttcttacactccttgacctcctcacctcttaggggtcttttttttattttattttatttttttttttggagacagagtcttgctctgttgccgggctggagtgcagtggcgcgatcttggcttactgcaacctccgcctcccgagttcaagcaattttcttgcctcagcctcccaagtagctgggattacaggcacgtgccaccacacccggccaatttttgtatttttagtagagggggtttcaccatgttggccaggatggtctccatctcttcaccctcgtgatctgcctgcctcggcctcccaaagtgctgtgattacaggcatgagccactgcgcctggcctaggggctcttttagagtttgttttccataaagtaaatagtcatgggtgactagtgtttgtgaagagatgagaaagaacatcattctaataatcaccatcctggatataatttgtcatcagtccaggtgcagtggtgcaggcctgtaatcccagcactttgggaggctgaggtgggaggatcagttgaggccaggagttggagaccagcatgggcagcatagcaaaacccaatctatttaaaaaattgtttaaatgtaaaaattaatctattatcagacaactgctgtatctcccttaacttgaacaacatcctggacacacgtgttctgacataggtcacctcaaaaaccgacagaatatgctagttaaatgctcaaattctttcatttaaaattttcttaacagggagaaaacacaatttttctgtaaatgacggattgcagctcggttgtgaggacattggaaataagcctgaggaaggctggctgcctttaaacaggaagtttgtgatgagtgacttttaatcaagttacaaccattcataatggcttaaaaaattgttgtttatgtattctttcacttcctaaaacaaaatagccagtgtttattgtcattgtgtcaggtgatgcaccaggcaacttcatgtatatcatgtatatcatgccatccgtacatgtaactgttttacagatgtgaaaacaggcttagtgatgagatccaggacctactcagaagggcccagcagtaactctgcctccagagccggcacctccggttctgcctcacagtgtacttcccaagtccatgaagcttctcctgacacctatgagttcttccatttgtctttttagtactatttgacatgcaagcataatctcctacattccttttgcagtggatagtcatattttcccttcctttggaatgactgactagagttagagataaagctgtgtaactaaatttgtgtctatagcggtttgagaccataggtaaggattggcttggctaggggaggaatattgcatgttcttggtacttgttttacatttcttccagtactaaagctccatgtggttctattttttgtaaatgaacacccataagtttcccatctgcgttgtaatctctctgaactttgtttccctaacataaaacaagagcgttagaccagatgaccttcgaagtaccttccggttttaccaggccgccagtctctgtccacagccctgggatcagtggagatgctttaagacctctgcacagtgggggtagcagtggggggtatagtggtctttgaggatattcgggcaagaaggaaacgattctgggaaatgaaccagccttatggaaggatctagggtgtaagcatgtagattagctattctcagcagatcttgtgttaaacactttctaacattgatttacatactgtctattgctaacgtgtgtctactgacaactcttgtaaaaaaagggttggcaaaaggtcatgttttccttctgtttgcaaacaaaatggattatttttaaaagttgttgttttattagtaactcttaatgggaactctgttgaatagattttcctagttcagtttgttttcacttgtggaagtgcaggaagagctggtgtaaaagagaggaaggaggagggagggaataaaggccatgccgggagcctgcataacaatcgcacacattgagaaagttcacagaaattagattaaatgctttgggaaaatgtagtttgtctagcattttgaaagaatttctagaatttctgggacaatgagttcatttaatcatatgttccagtttctgagtgtgaagttctttttgttggatttggtggctgttgctcacaccttcacgcagggtggtgggcagttctaggtagctgggggtctctggggacctttccgctttccctgtgagtccccacaggttttccctaggatgatgctcacatctgaaatgcacgcttcagctgctatggattcctgccataaagaagaacccactagaataagagcaaatcacattgtgtaaattttttttttttaagacggagtcttgctctgttgcccagtctagagtgcagtggtgcgatctcggctcactgcaacctctgcctcccaggttcaagtgattctcctgcctcagtctcccgagtacctgggactacaggtgcccaccaccatgcccagctaatttttgtatctttagtagagatggggtttcaccatattgcccaggctggtctcgaactcctgatcttgtgatctgccctcctcagcctcccaaagtgccaggattacaggtgtgagccaccacgcccgcccacattgtgtaaatttatcacctgttaaggcagaaaatgagctttgtaaactagtaagcagaattatttctgctccctcaaggtgcacacaagtaacctcagccttaagtatgttcctttgattcttcttaacagtggtgaaggcaaggggatagttttttcagccagcagtggggttgcaggtagaatcacagagctttgctttgaaccctaactggacagatcattttctgagtcttaatttttccttttccatttctaaagtgaagccagtaatacctgccttatagggctgttgcaaggatggaatgagatgtattgacagcagtaaactataaaatacatagtttatataataaactatgaaataaatacaaaaatataaaacacggggtatgaaggccatctaagggtttcatgagcaaggtgtattcagccttaagttgaggttttgcattatttttggttaaatataaagaccagggtaatcatagaactgccaagcagaaagaaatgtagaatgtagcagtggtgtggagacccgtggctgacaggtggtggtcttcatataggctgagggacaggctagatgcatgtcaagtggcagctcaggttggaagacaggagttggggatgtgagagtccaggccagggtgaagagaagtggctgggaaggcagccaggctcagctcttaggaggcagagagctgcaagcagagggtgggaccaggtctcttttttcaacccagtcttgagggatgggggcaaagtcaacctagacttgatttagagctagttctgttcacttgatcatctttattgggccttcaggctcctagaagactaccgtgatagactgactagtggtctgtaaatggtttttattaaaaaaatcacataccctttttgataaaacatgtatttgtttatacactttaaatatattgtgtaattatataatacattcacaaataagaattttaaaagaatgagataaaaaatttaaagtaggccaggcgcagtggctcacgcctgtaatcccagcgctttgtggagactgaggcaggcagatcacgaggtcaggagttcgagaccagcctggccaacatggtgaaaccccgcctgtactaaaaatacaaataattagccaggcgtggtgacaggtgactgtaatcccagctactcaggaggctgaggcaggagaatcgcttgaacctgggaggcagaggttgcagtgagccaagatcaagccactgcactccagcctgggcaacagagtgagactctgtctttaaaaaaaaaaaaaaaatgaaagtcaatgaaagttgtaaagatttcatcctgcacttcagtggctgatgattgccttagacagtgggtctgggagcatcctggggagggcatgtgtcctcaggggtctctggggaccagcctcagcacctcacttcttccagccacagagacagaacatcagaaccatccttcatggagcttcccaactggcctgttgaggtccctgctctgccaacccctgctgctgctctgcacatgctggctgtgtccagagctcggaggcccctggccccagcaatgtgtgatgcctgcacatgtggcttggctgcagcaccttgagaagacttaaatattctagtgacattggctgaccagggcactgacagcctcaccttagtatttgaatcagttctgaggcaatatctagtgtcaagagaaaaatgaactgtttttcccaaaccagtcaatctttccagtaattaacatataaaaaagcctcatgttaagtgagagcagtgcagtgtgtggttataaagaaataagactaatgtttatgacatacataggtctgtaaaacacagacatatgttattttatggatgctattatgccagtagtgataacagtaacattagctaatagagattaaggtaagcctttccacgcatactatctcatttaatctttgcaccaactttgtaaatgtaggaaatactaatctgttcaacagatacttgagtgcccctatggtgttggtgctgtgaggatacagtgtacaagaagacagacaaaggtccctgtgctcacttgagcagctcacagtgtagtgggaagtcaggcatgcccccccaccgccccagggatcagacatagtggaatcataaagaggggtgagtaagtaaggtcccatgttagagctgcaggatgggatgaggtcatcaagaaatgcttctggaggggccagttgggctgagacagaagctggggcatggagggcagggtggcagcctttggagagaaaaggtccgtgttcctggacagtctatgggttgtgtcatcctattaagtggctctttacgtgtacttattttctccccaggtagatcaaaagcttctggagggcatgttctgtgtctcattccttcatgtctttcgctactccttccacaaaatagtttccagtaaatgttagttgacatgaattggtactcaaatggatggttaaaagatgtgtattgtgtaagacaccatatcttccttgtaatttttttgggggtcaagcaacaaacagttattgaggctatgatattagaaattaaagacaagctttagcccatttgctctttaaggaactcagaatctgaacatagaacagccagcagagcaggttgaacaagcaagtacaccatgtcggggttccccgactacaccatgtcggggttccccgactcccccatctgtggagctcattgggtcaggcttcccaggaagcacatgctgcactgcttggggtggccaggcatgcagatggcagatggggtgtgtgcagaggcttgtgagtggggctgcagagaaacaagctagtggagaggagattggctggcttgtgtttctctagtgccgtcatgtagaaacgctggatttgggcaagtgattgacagggcatgaacctctgtcctgacatcctgcctctgtcctcaggtaatatttgttgagagttcaagggcataatatttcagagcccagcagtctcacgcggctctgctgcgaagtccttctggtgaactgctcttccatccagcctctcctgtggccagtaggggagtgcagacacaacgtcgttaatagcaacacatttttacaaaatttaccttttcaaaccccaccccctagaaaccgtagcttctttaatgtcccgctggctgtgtgaaaaacaggaatttatgtaacaagtcctgcacagcaaaccttttcctgttcggaaaaaattttaattgttggcaaagttaggaaacagctctgttactcaaagagcgacctgaaatgtcctcttagaaaaatatgtaatatgatgttttgataagtaggagactgctgtggcttttttttttttaaagtctaaattagtatatgtcccacctgagttagtgaacgcttcttgaatgttttaaagatttccttattatgtctcctgcagtctttttaaaaatgacccccagctgggcttgccagtgatctgacaggcttatcatgaatgttagagagcttcaccccctctccccaagtcaatgcaacaaccaggaagcttctatctgggaagatctttcttccccctttatcattaactaaatgtgacagggacaggagtcaagcttcctctcctccagagatttcatcggagcttatctgtgtgtctattgtgttcaaagaacaaaactgtcatgatggaatattgtgcaaatgcctggacttccagtgtatagaaaatgtcagggtcagactgcagggctgcattccagtgctaccccaagtgcgggcctgctgatcttaaggaggaattaagaactcggttcggctggggttggtgggtacagcagacaaggctgtggctctgtgagcatacatgtgtgtgtgtggcgccttcccataggaatttggggatcttaggggaatgcaataggatgggagggaaatgtactccctggcctcttttagggattcttgtacctactctaagcccctggccctcctcacagcgtgtctcgaggtgagggtagatcttgggtgtggaggaaggtggggattcttgggaacaggagacagtcactgccatcaccacacacctgctccgttccagccgggaatctggggctccggtggtgtcttccccgctctcacacttcactgtatgctctggcaggagggcttgtcacgtagctgctgtgttgaaatctttaggcggaatgcagtacagagagtcagagggcgttttgaaatgtggatttctcagccctgactgctgggccttaccctgacttttgcatctccctttagaaagtgagacccctccattttctctcttctaccaccttttaatgagagaagacttctctcccagtttgtgttggagccaggcctcatcctgctgtgcagaggctctgctcaggcgcagtggttggcactcgggcccgggcgtcccatgtcaatggcatgaggatgtgggcgctgtggctgcacccctgggtgaccacaaatccagccagagcctttttgtggttgagaagaggggccgcagagatgcagggggcatggtcagctgagccttgcatccagttggcagaggaggccaagaaagctgggagactgtgcacattccagggtcttagggcacccagaatcccactccttgggagcagacctctgaggaaagaggctgctgaatgaacaaggtgtagtggctgtgtgccctgtactgtgctgggggccagaagctataagacaaggcccttccttctggggagctcacagcgtttccctcgtctccttttccacgtgtcccacggactcccctgaacaccatcttactctgtgttgtagaggaggtgaatcaaaccatggctttctcatctgcagcctggctctggtgtttctgctgaaacttggagagaccacctctggcccctttcaccatatatttgcagttgtgggtttgtatctgtactacttctaagctcctatacataccacactgaataggaatagagaagcaggactttggggcgcaggataccactattctaagttggggtctaatattcccttcatggtgactgcttacatgccaggcaccgctgagcatttttatgtatctcatttagtacatgtaacaaccctgataaggctctgtaatttagccctgctttacaggtgaggaaacttaagacacattaggggctaggcagcttcccaaggtcacctaggtaagtaagtagcagagccacccaggaagtactcaaaagaaagattgttggtttttcttccctagttggcctagggatgataaacatggcatgattagttatgaagctgcggtagcttgagagttagagctctttgcgttctctgtcatttcttcccatcccaggttgtctgtttggacagtgtagcccctggctacgtggaggtgtgtcatggagttagttggtgcatcctgctcatactactggtcattggtagaactggagggtaggggcactacttgaattaaaaaaaaatttcttttggcaggtcagctttctcaaatacaaaagcaatgactctgttttccttacattcacttgtatttgcttaatgggctttaaaggtgtgaatgaatccaagtcttattaatttgggggcctttaattcttgatcagctctatatttctatattctttttttttttttttttttggcgacagagtgtttaactcttgttgcccaggctggagtgatctcagctcaccgcagtctccttctcctgcctcagcctgccaagtagctgggattactggcgcctgccaccacacccgactaatttttgtatttttagtagagatggggtttcaccatgttggctaggctggtcttgaactcctgacctcaggtgatctgcctgccttggcctcctacagtgctgggattataggtgtgaaccaccatgcctggcctatattctatattctatatattctatattcttttgtcttttttgtttctgtaagtatgtgggcccagtaatataaaacttctttatgtaaatggcacaggttcaaactgaagagaattggcagtagttttaaggatagtagaatggaaggggtttttgatagcactttgatacagagtactattgtagctaagcaaaatttaagcggttattaaaaccaattcctttgatttttccataaaatgtagctgtataaaagaaggtatttacaatactctttattaaattttgtcccttcattaaattaagatatagaatttttttttttttttttttgagatcgagtctcactctgtctcccaggctggagtgcagtggcacgatctcgcctcactgcaagctccgcctcccaggttcacgccattctcctgccccagcctcccgagtagctgggactacaggtttgcaccaccatgcctggctaattttttgtatttttagtagagatggggtttcactgtgttagccaggatgctcttgatctcctgatctcatgatccgcttgcctgggcctcgcaaagtgctaggattacaggcgtgagccaccgcacccagccacagatattgtttttaagataagatactatttattcctgtgctatttgagatcttttgtagtggcttcagagccattaggactgttcagatggaaatctgtagcacacactcttaagattttttacttgttttccatgtaatacatgtagaataggaagttttgcaagcagagaagtattgtacttctaataagatgttttgccttacagaattcaattcgtcataatctgtccctacacagcaagttcattcgtgtgcagaatgaaggaactggaaaaagttcttggtggatgctcaatccagagggtggcaagagcgggaaatctcctaggagaagagctgcatccatggacaacaacagtaaatttgctaagagccgaagccgagctgccaagaagaaagcatctctccagtctggccaggagggtgctggggacagccctggatcacagttttccaaatggcctgcaagccctggctctcacagcaatgatgactttgataactggagtacatttcgccctcgaactagctcaaatgctagtactattagtgggagactctcacccattatgaccgaacaggatgatcttggagaaggggatgtgcattctatggtgtacccgccatctgccgcaaagatggcctctactttacccagtctgtctgagataagcaatcccgaaaacatggaaaatcttttggataatctcaaccttctctcatcaccaacatcattaactgtttcgacccagtcctcacctggcaccatgatgcagcagacgccgtgctactcgtttgcgccaccaaacaccagtttgaattcacccagcccaaactaccaaaaatatacatatggccaatccagcatgagccctttgccccagatgcctatacaaacacttcaggacaataagtcgagttatggaggtatgagtcagtataactgtgcgcctggactcttgaaggagttgctgacttctgactctcctccccataatgacattatgacaccagttgatcctggggtagcccagcccaacagccgggttctgggccagaacgtcatgatgggccctaattcggtcatgtcaacctatggcagccaggcatctcataacaaaatgatgaatcccagctcccatacccaccctggacatgctcagcagacatctgcagttaacgggcgtcccctgccccacacggtaagcaccatgccccacacctcgggtatgaaccgcctgacccaagtgaagacacctgtacaagtgcctctgccccaccccatgcagatgagtgccctggggggctactcctccgtgagcagctgcaatggctatggcagaatgggccttctccaccaggagaagctcccaagtgacttggatggcatgttcattgagcgcttagactgtgacatggaatccatcattcggaatgacctcatggatggagatacattggattttaactttgacaatgtgttgcccaaccaaagcttcccacacagtgtcaagacaacgacacatagctgggtgtcaggctgagggttagtgagcaggtaagttcaccccaatatcaaaagaccttttgaaaaatagaacttaaaagcgaggaacacagtaacttgccatggttagcacatctttgatgtcaactgactgtcccttgcagagagggatcttttatcattcattctctgtcctttttgcagcttacagttttccttctgagcttacacagaaggaagcttcctttaactgctttaaagatttctttttgacagttcgatggctgcatctttttagtagctcttcaataaatgaatacatttgatataaatcaaatgctgaagggttttttgtaaagtagaattttccccattgaatgattttagagctgtttgagaaagctctagctttttgcccctaagtatgtctgtcactcttaacatgttaagttgaattgattttaatttggctatattttcattgtgtgtgtatgtgtgtgtgcgtatgtatgtgttttttcctaggttacacttaaaagtacttcagattgtctgacagcaggaactgagagaagcagtccaaagatgtctttcaccaactcccttttagttttcttggttaaaaaaaaaaacaaaaaaaaaaaccctccttttttcctttcgtcagacttggcagcaaagacatttttcctgtacaggatgtttgcccaatgtgtgcaggttatgtgctgctgtagataaggactgtgccattggaaatttcattacaatgaagtgccaaactcactacaccatataattgcagaaaagattttcagatcctggtgtgctttcaagttttgtatataagcagtagatacagattgtatttgtgtgtgtttttggtttttctaaatatccaattggtccaaggaaagtttatactctttttgtaatactgtgatgggcctcatgtcttgataagttaaacttttgtttgtactacctgttttctgcggaactgacggatcacaaagaactgaatctccattctgcatctccattgaacagccttggacctgttcacgttgccacagaattcacatgagaaccaagtagcctgttatcaatctgctaaattaatggacttgttaaacttttggaaaaaaaaagattaaatgccagctttgtacaggtcttttctatttttttttgtttattttgttatttgcaaatttgtacaaacatttaaatggttctaatttccagataaatgatttttgatgttattgttgggacttaagaacatttttggaatagatattgaactgtaataatgttttcttaaaactagagtctactttgttacatagtcagcttgtaaattttgtggaaccacaggtatttggggcagcattcataattttcattttgtattctaactggattagtactaattttatacatgcttaactggtttgtacactttgggatgctacttagtgatgtttctgactaatcttaaatcattgtaattagtacttgcatattcaacgtttcaggccctggttgggcaggaaagtgatgtatagttatggacactttgcgtttcttatttaggataacttaatatgtttttatgtatgtattttaaagaaatttcatctgcttctactgaactatgcgtactgcatagcatcaagtcttctctagagacctctgtagtcctgggaggcctcataatgtttgtagatcagaaaagggagatctgcatctaaagcaatggtcctttgtcaaacgagggattttgatccacttcaccattttgagttgagctttagcaaaagtttcccctcataattctttgctcttgtttcagtccaggtggaggttggttttgtagttctgccttgaggaattatgtcaacactcatacttcatctcattctcccttctgccctgcagattagattacttagcacactgtggaagtttaagtggaaggagggaatttaaaaatgggacttgagtggtttgtagaatttgtgttcataagttcagatgggtagcaaatggaatagaacttacttaaaaattggggagatttatttgaaaaccagctgtaagttgtgcattgagattatgttaaaagccttggcttaagaatttgaaaatttctttagcctgtagcaacctaaactgtaattcctatcattatgttttattactttccaattacctgtaactgacagaccaaattaattggctttgtgtcctatttagtccatcagtattttcaagtcatgtggaaagcccaaagtcatcacaatgaagagaacaggtgcacagcactgttcctcttgtgttcttgagaaggatctaatttttctgtatatagcccacatcacacttgctttgtcttgtatgttaattgcatcttcattggcttggtatttcctaaatgtttaacaagaacacaagtgttcctgataagatttcctacagtaagccagctctattgtaagcttcccactgtgatgatcatttttttgaagattcattgaacagccaccactctatcatcctcattttggggcagtccaagacatagctggttttagaaacccaagttcctctaagcacagcctcccgggtatgtaactgaacttggtgccaaagtacttgtgtactaatttctattactacgtactgtcactttcctcccgtgccattactgcatcataatacaaggaacctcagagcccccatttgttcattaaagaggcaactacagccaaaatcactgttaaaatcttactacttcatggagtagctcttaggaaaatatatcttcctcctgagtctgggtaattatacctctcccaagcccccattgtgtgttgaaatcctgtcatgaatccttggtagctctctgagaacagtgaagtccagggaaaggcatctggtctgtctggaaagcaaacattatgtggcctctggtagtttttttcctgtaagaatactgactttctggagtaatgagtatatatcagttattgtacatgattgctttgtgaaatgtgcaaatgatatcacctatgcagccttgtttgatttattttctctggtttgtactgttattaaaagcatattgtattatagagctattcagatattttaaatataaagatgtattgtttccgtaatatagacgtatggaatatatttaggtaatagatgtattacttggaaagttctgctttgacaaactgacaaagtctaaatgagcacatgtatcccagtgagcagtaaatcaatggaacatcccaagaagaggataaggatgcttaaaatggaaatcattctccaacgatatacaaattggacttgttcaactgctggatatatgctaccaataaccccagccccaacttaaaattcttacattcaagctcctaagagttcttaatttataactaattttaaaagagaagtttcttttctggttttagtttgggaataatcattcattaaaaaaaatgtattgtggtttatgcgaacagaccaacctggcattacagttggcctctccttgaggtgggcacagcctggcagtgtggccaggggtggccatgtaagtcccatcaggacgtagtcatgcctcctgcatttcgctacccgagtttagtaacagtgcagattccacgttcttgttccgatactctgagaagtgcctgatgttgatgtacttacagacacaagaacaatctttgctataattgtataaagccataaatgtacataaattatgtttaaatggcttggtgtctttcttttctaattatgcagaataagctctttattaggaattttttgtgaagctattaaatacttgagttaagtcttgtcagccacaa

SEQ ID NO: 10 - DNA, 97284 bp, Homo sapiens
actcggtgtcaccacaggaggagactcaggcaggccgcgctccagcctcaccaggctccccggctcgccgtggctctctgagcccccttttcagggaccccagtcgctggaacatttgcccagactcgtaccaaacttttccgccctgggctcgggatcctggactccggggcctccccgtcctcccctttcccgggttccagctccggcctctggactaggaaccgacagcccccctccccgcgtccctccctctctctccagccgttttggggaggggctctccacgctccggatagttcccgagggtcatccgcgccgcactcgcctttccgtttcgccttcacctggatataatttccgagcgaagctgcccccaggatgaccacgctggccggcgctgtgcccaggatgatgcggccgggcccggggcagaactacccgcgtagcgggttcccgctggaaggtaagggagggcctcagcgcgccgcctggatcccagggcctgggaccggctgcctcaccccatccccaggctccgcaggctcctttggtgcttccaggaagcccattccctgggcaccccacaccccaagaagcaccagtcgggggcgaggacctactcgatttcctttctgcaaatggagcgcgctgctctctgcaaatcctggcggagctgggcggtcaggcctgcggcgagccggggagacttgtccctgttgttttggaaatgccgcggtggagaaggaggtgaaccggcttctgagcggcagaagcaacttctccgcaatttgtccattcgaaattgtctcgaagttgtctcgaaattgtcccggctgcgcccacacttgtgaaacatatgttagttcaggaagtatttttttttttttgccctgcaaagttgtggtggctaacgccgcgccattgtgattggaatttttagaataattaaataaattagaattctatgtatctcaaatagcatctagaagtttctataacttgtttaggaatcgcctttccgtccacttgaagattctgggaatcccggggaggcaggaagtcttgcaagcctgagccgttttcaatggttttccaggttagggcgccccagcagagatgctcatcgcccccgccacccactcccttcacacccagcctagagtagaatgtaacacccagagcaagaatgggggctgggggcccaggaacagccctgccgctgctgtggtctctgtcccaagatgtaacaggtgacacaggcactgctgcttgggcctcctttctggaccctctttgacccttggctgctgcacttttggctagaaaccccaagggctatcagctggcccaagtcccttagaaagggagagatcccaattggacagggatcggtgggagcagagttcatcaaggccagctcctgggtgaacttctcttcgccaggaggctgtttctagagcaagctagactctctaccagctgcagggtctcctaagttgccactccccgggcccgaaggggaagacgctttctctggggagaattattttgccccatttgctgtctttacacaagattacatgcgctatattgctgaataatttgaacaaatgtgattgaaaggaggtctgggtctgggagtccgatgtcgagcagtttcagcgtcggtgctgtaacatgaggataggacagaagactgcgaaattacgtgctgctgttctttgctttttattttcctccagtgacttttcccttgcttctctttttcaccttcccacagtgtccactcccctcggccagggccgcgtcaaccagctcggcggtgtttttatcaacggcaggccgctgcccaaccacatccgccacaagatcgtggagatggcccaccacggcatccggccctgcgtcatctcgcgccagctgcgcgtgtcccacggctgcgtctccaagatcctgtgcaggtaccaggagactggctccatacgtcctggtgccatcggcggcagcaagcccaaggtgagcgggcgggccttgccctcctggctcccagactgtggtcccctgtgttggggaagaccgggcggggggtaacggctgacatctggggctctccaatgagttatttctgaggtttgtgaaggtgcgtaaaggcgcgcgtgtgtgtgtgtacgtgtgcacgcgccctggacacttcttgatgaacacttagggaaagctcttgcctttttgcaaaggaaaaataacatctgttttttaaagcccataagccttgcaatcctcatcaaattattttaatggataaacacctaaagcaggcaagctctatgtgcccacctgttgccgatttcttccctaagtgtcttcccggctcccacccatggcaccgtcctttccaaaacgaatgtaaggaacttctttaggttttataatggtttgtctcccaaaccccgccctcagtctcccccagtgcaaattgttttcaatgagtcaaatactagggtgatcagttttctttgtaataagccaatgactccattaaaaaaaaataagcagtttggtgctatccttaaattatttttggttctgtttttaaaaagaaagagtcacaccagctagggctgagtgggagggaattacacaaggtctgtcttttcttctagttgccaccgggcaaaatcaagagggttatggtaaaccgaagacctccaaacaccctcctcttccttcccacctactgaaacactttcacagcctttctaagaatctttggaaccttcttcttctttttaaaaaatatatattgggggtagagagaagagtcagtctctcttaattaatatttgttatcgactcgaagttttaaaaacccaaatacatacctttacatttcagtcttcactttagcataaatatccctttggaaaagcacaagttgcagatttaacttgatttttcagctcctttttcaaacatcgcttttttagtttcgttttcatgttggttctgtgtaagcagttgccttatttccagggatgagaaagtataaccccaccctacccccatcaagatgttataattcttctgaatttatcccggttgtctggggcttgtctggggaagttagaggcttcccaggctgctccgggatgggatgggatgtgttctggtctgcccctttctaaagtgcctcagagagttcaggtctttttgctcacaaagggggaccgtcccagaggattcagcgaggagcatcccgacaggcccagaggcggtggggccgccgccacctggcccagggtaccgggtaccaacgcctgcccgcctgttctcttaaagcaggtgacaacgcctgacgtggagaagaaaattgaggaatacaaaagagagaacccgggcatgttcagctgggaaatccgagacaaattactcaaggacgcggtctgtgatcgaaacaccgtgccgtcaggtactaggcccattaacctctccccgaggcgcgacagtcagtcgctattaccccggcacgtcgacccagacgtaatcaccccaattatcgatctcagctattgggaggtggcctctcccgaggccctgcaatatttgccaacccggtgttcttggcactttatggagggaggggtgagctgcttgtcctggggacggagggtggcgagaccaccgctgaggacgccccaaagaagatttctgtcgaggaggcagggcaggaaacgtgaggcggaggcagagcgtttattaatattgatgttcccttttaaagagaaacaaatgttttggtaaccccaaccgaagggagatggggcccgcgccgggagggactttgccgtgtgcgcaaagccgtggaggcttccacaacggccccgatttcctccgagagtctcagggacggtccggagccccccgccacggcagcctgggggaggcggagggagaagaggggcaagcacggggccagcgagagggcgcacgggagggtttgtttttaattaaaaggaaactccctttttccctctgtgagaaacatatttcagagcatggatttgtttaccagactggaatctggaaaaaataagtgggagagagtgcattttcttttgatttttacaataggaaacgattctgcagttgaaatttaaaccctttatagccttaaaaaaaaaaaaaaaagggaagaaaggaaaaaaaagaaacttgatttacgggggggtgggggggggcgcggacaagtcggctttggttcttcctcccttaaggcgaaccgcaggatccatgcattcaggtggggaggaaggagggtacccggtgggctggtgggagaattctcttagattgcagacctagagcccggtcttcggagtccaggaagggaaatgcttcctgcccagaatcgagggacaaagatggcatccggccctaacttggaggcacggttttcccagcctccgtctttcagtaccgagatacagataatagggaggggggtttgagtggcaggatgagagggctggagaaggatgaggatgtccagagatgcaggaggagacacccgcgagcagtgcagggcagcggctctagggccctggctggtgtttgggggtggggggtccttcccgcacagccctgcttgtctcaaccatgtgcgctcccttgcttccttcctcctcccgcccccagtgagttccatcagccgcatcctgagaagtaaattcgggaaaggtgaagaggaggaggccgacttggagaggaaggaggcagaggaaagcgagaagaaggccaaacacagcatcgacggcatcctgagcgagcgaggtaagcggtggcgccttgggcggcgcacttgctgggtgacttggagggcatcggctagctgacattggtgatctgacggcagccaagcccagctcggatcaaggtcccttcatgcgcggtgtctctgcgcctgagtaacgacatggaactgaaagaccagagggacactaggaatcaaaacaaacatttctattctgcttagtttttctgttttgtaaatctttctttcttaaccactttcagcccctgggattctagaactgtgaattgtgctctgttgtagggggcaggggaagctctcactctgttgccattaaatgtatgagactgggcatctctgagcaattgtagggccggggatagagggtacttgaatcttcagaagttgaagtagcttttatgccctcaggaaaggccctggtctccggagtttcctcgcattaaaggagagagagagagagtactcttttgggcaacggccctccaaaattgcccccacattggctgccttataaatatgtctgtgtgttgactggtttgatttgtttgaagttgattttcaaatgtgagggggtttaacctgtgtgtgcctgggaattgaaaggaacccaagctctgggttacaaattgaagggatctgggttcttagagtgctggcaccctctgtcttctaggggtacagatccccattccttttcggctgtgcactgtcggcactaagaaaaaaaatctcccccatgggagacagaagtgcagcttgcttccccttcacctgccgcaagccatcctcaaactttaagggtacaaacgcaaaaagaaagaaagaaaggaaaagaaatgctgaaccaggaaaggatcattgcagcaggagacggcaggggggaggggaggattgtgtctcagtggctttggccttgggggtggttgcccctcttcaaatgcacaaatggtcaagagtggccaggggtcccactcatgcctgaagtttcctcacctgggacttggagttcattgggcaaagttagttttggagttgccagagggacaggcggctttccaggtgggctcacagccgttgccgactgtgactagctgggtccgagcccttaccagagtggcatccaagtgggacttcttttatcttcattgcccaactctgtggcagccagtggctctcctgagcagctgctttacaaagcaatgcaaaatctgcacacaacctggaaggaacatttagatttggaagttacagatccaaatggctgatttgagggaaaaacaagtgtagatactctgatgcacacaagaaatcaaagacatgtcaaaccacagcaggttgggcagggagatgcttcctttgctttatgacagaggcctcctatggactcagcctaaatcctctttttggagaggtgcatttttctgccttggtctctgagaagacaccttggcttttatcccaggcctagctgcagaatagaggtgctgagaagggaggaaggcagggagtcagacaaccccaaaccaaatgtgctcctgtgggcagtggggagaagagcccagagcagtcacagaggctggggactcacggctttgctacttgttgctggaggctccggcgctggcagactggctgctctctcgcagtacaggcgactgaggcccaggagacaaaacgtcccaaatgagctggtcaaacatttgtacaacttttccagcttttacaaagaagtccttctctacacaatctacacttggagatgaacttgggagacaaagcctggagagtccattgaaactcacactttagctcagcccagacaaagctccagctcggagcagcttgatgtgaacaaaggaaggcaacctttttataattcaaggagaaaagaagagaaaacagcaccacaaaaggctgagaatagacattatgggcttgcaatgagggatgaattattcaatgagccccaatagctgctgcgccgggaagttttatggactcttcagcgtggaaaaagtggccatttcacctacaaaatgtttctagtcttttgggctgtctagctgggccggctgctattcaagggcaattgctacatttttaaaatcagagtattctccccagtgggggctgtgctgttggaaacacacacacacacacacacacacacacacacacacacacacacacacacaccttggaggctgaagcctgatttaatttggggttgtcaaggaagatgcagtgtctgtctcttcagcatctctagctcctttttagatgagcctcggaggacaagaggggcccagagaaaggacagagtgaggtgcagtttgaagtctagaaacttcaaaaactcctttctgttgttcgggcatcaaaaatcccaggctgcccgcttgtaaaatagaatgaatgttgataaagcgttcttagcgccctggcagagggggagaagaaagctgagggaggaggaactttggggtcccctgaccagtgtggtgtattcttgcccttttccagttagtgggtctggtgggtgctgctgagcctggcttttcaggggaatctttggcctgaggtctgcttggcagacactaggacaaaagggttgagccactttgaatgaggtcagaatcacctcattcttctctccagtggctttctcccagatggtcctcttaactttcccaactttcccttttccctcgctcaattcaagagctgagccgctagcggtgctggtgcgctcaggcccgcgctccctaacgggcgcgcgctaagcatgatgcacccttgctggatacatccctccagctccatagcccaggagaaaggagagggctgggcggttcactaacacgaaccccgcccgctatccccaatccccctagcccctggcccgcgctgagactggagcagaggcagccgggggagccaagtcctggccgaggcatccggggctgtgggcaccgccctgcgcagcggccgctcaatgggcgcctctgttcctcccccggctcggcctagcgggcccgcgggcgccgccacaatgggctgggcccccactcctgtgctctgcgccaaagcgccgcgccgctccgccccctcccctactctctggccggctcgaagcttagctcgccgggctgcagccgactcaattgcctcctttatgtccttctcactttcatctagacacagcccgcctccccccttcttctcctctttttttttttcctcccttgcctgaggctcacattagtgaaatttctgcaacctccccccatttttttcttattttaaagaaagcccttaacacaaaagcggtgactaatcaatagaaactgccccttcatcatctcctcctcctcctccacccctccttctccccctccagcagggtgacgcttttcctgtttgtgagttttgggaaacatttttgctttgtgcagtaatggaattagaggacagttgaggactgtaaatggacacgcgactgcaagactctcgcttaaatatttagatgcaaagttacaattactgacttgttgtagcagctttgaagtggcagctccggagcgcagggggagagaggccagattgccaaattgatgttttgattggggactggcgatacactctcataagactttcctcccttttaaaatcacaagtgagcgtgggaggtttgcaacaatttaaaagatcccactaagagatctcaagcataggtctgttgggggcttatattcctttcctatctgttccctcttatttgacgtttacaaaaaagagtgctttcttaaaaaattggagaaagtaaaagtgacgaaagctttgctcaagtttccattttatttgtaagcttgtcagcttttgtaaagttaacgaggacgacttcagctttttgggggggaggtaggagaagattaatcagtttaaaacgcagaaaagcattaaaggtatttggagtattttatttccagtgaaatcatgaaaagagcactcttatcattaagggactgctgaaatcaaggaaaacgaagggccgtttctttcccggttagtgagcaggaagggccattttggtccaaggttgggaggaggggaaggcgggggacgaactttcccatagattaaaatcattgggtataagatcataggtttatggcatcggatcctttattcaagtggacagaccagcccactttccaagtccatttgttaggatcacgaatttgacttcaatgtcgtttcgattctatagagaaaacttcatattttctgaagtccttgcaaaactcagcaaagaaatatcatccatttaaaaaatattggaagtatcagaacttgaattctattagaacaccacgccgtgttctatttattaatgtcgcggtaacaattttcctgctggaacgatttgaaaggaaacaccagagttcagctcctagctttttctttttcgcttgtttggtttggttgactgctgtgtgcttaccttctagagctttattgaaaacatgcagattttctaattaatgcttgaaatcgtatgtttattttggggtttgatttgattgttgatagcaccggaaccaggacgtaggggcttctactgagtaataattactgaagggtcatttaaaagtccccagggctgagcaataaaacccacccgggcggtgaggcggaaccagtcagcgcgcggcggttcaggcgagtggaatatgcagaaatcgatcacgtgaataggagtgtggccgctaaatccgaatggcttcagcatccatgaatgcatatattttgagaacaacaacaaaaaattcttcctatgagactaaatgtttaagttgtacataagtagatggccaatgaaaatgaaaagctgcaacagtaacaacaaacaaacggtgagaaatgagagtttggcttgggctggaacagaaaatgttttacgttcgattggattctgtatgacaggtaacttatctatgagggtaaataaagattaaagaaccatttagaatgtacatatataactaacaagacactaaaaggcaattaagcagtcagtttaatgtcttatctcactggctgctctggggttgttttacaagtaggaattaaaatctgaaaaggaagttttcagcagctctggccaaatattgattaagtagctgtttgttgataccattgttacacattaaaaggccgggagcgcggcccctcagtggtcatcttccattgtgaggggttcttaaccatagagatcaaagcgggatcatttcaatttatctgtcctggaaaatccttcttttcctctgaaatctctaaggaggaattgaccaaattctctttaagaaataggaactgaaaccagttacatgttgtaggtttgtagagaagactcatggggtgtttttaattatcctatcgtgatttcttacttagaactgaggctatgatggtgaatttatcatcaaatagattctcattttgggggggtgtggcagaaagcatggcagctactatctgcctgttgctaagtttctaaatacaaaagtttccctaaaattgtcttccaagctggaattatttaatgaaaacatagcagatttttatgtaaaagtaggtagggaataattaaatacacaggaatctgagtgttatattgactacatctctctacacgtgtttccataatttctgtgtttatagatggttagatgactctcatgtatatttccaatcctctataatttaggaatagatatgtgtttatgtgtatgtatgtgcattgttagagtttatttattacactaagaattatgctggcactaaactatatttagttgcacaaaatgaagatatgtttgtcctatggattgcactttctaaagtcatcagaaactgaggtaacagcacagcctcccagttgttgaatgccaggagaaatatttccttgaatcattttatgactcttttaaactgttgattttgagatgaactatccgacttttgtttgtttgtttaagaacacaatatatttgcataggtttttcttttattatgaaagcaaaaatcctgcaaacgaatcttttggaaatactatctctgtgcttaatttgcaaattccaacaaatagcactaactgaggttgtaaaattcatgccagatttaggctttggatatgtaactgtgcatcatggatctgcctgtgtgtggggttttcgaatctctttctttgtgctcatttcagtactaaaaagttgtgcatgaggctttattgttttattttttactcttgttcactcttgagcaagatgaatcttgacatacagagcagaattttggtgggtattatctaatattttctattataatcctcctattaattaataatccatctgtgctcaaatgctctctgatgtaaaatatttactaccaaacattgcagtgtagaacaactgcctgaaatagattaagctagaagttacagttagctcagatttgttatggttcccatgtcctgggtctagatatagcattagatagttctttgtcatatatttcaaatgtatattttgtatacatacagagttcaagtaacttttcttccttggatattaggccgtgtattcacacactgccccagggacagcatcttccagctccaagttgggcctgatcttagtaccaactcaaaattgctgacccaagaaccggctgcctttagttggggaattgtgaaaaggaatttcagacatttctgaagaaaattcaggtattgtcatctttctggaagataaacaccaaagcagcaataggtattataattctataataggtgaataaaaggtgttataaattcttaccttcaatacctattttctttctttccttcctaataaaggttattgaaaagactaatcccctaatggccatcctctgccctgttgggaaagatagttttgtcccattcacaccagtcttcggtagagcaagacacaactcagcttttagctctaccctacagtgttgggaaatactgagctccaatagcattgtgagcttttactggaagcagaacacctctcctttaggaaggctttcttcaaattatctaagctgagatcatgctccaaaatgaagagaatatgtatatttccaagttttagttggaatatgcacagttatcaaaatgcctgtttaacatcataaaacatcaattcacgagagaagaattagaaagttcaccattgtcaaagggagatatgaaaatcatgaaatatagttattgaagactgttgaggaataataggtgttataaattcttatcttcttcttttccttctttccttcctgacaaatctttttaaaaaccaccaacaggtaatttctgttgttgaagtggccatgtgtctttgaaaatgaaattgtattaaataagggcaacagtgttaagaatttgatttgatgcacatttcttctaggggaaaggaaaatcttgagaaaggattttgccttgcacgttgcatacagcaaagttcgcaccattttacattttgctgcaggattttttaagtgaaacaaaacaaaacaaaacacctccactttgtggtaaagtaagttgattgaagtagtctgagtttttatgtccacctcttactgaggtgattgataaattaccttccctagcaaaacagattagaactcaagataggcaactattaaactggctgtgtgtttggctccttaaactcattcagtaattccttgactatactttcttatgtacttttatttggccatatttactgtatctgtaatagtatgtgaatatcaactgaattctggaagccaattccccacgcatcttggacctaatccaacatattctgtttaaaaatagctgatcaagccgcctggcgcggtggctcacgcctgtaatcccagcactttgggaggccgagggaggtggatcacctgaggttaggagtttgagaccagcctggccaacatgatgaaaccttgtctctactaaaaatataaaaattagctgggtgtgatggcacacgcctgtaaccccagctacttgggggactgaggcaggagaattgctcaaacctgggagacggaggttgcagtgagccgagatcgtgctactgcacttcagcctggatgacagagcgagactccgtttcaggaaaaaaaaatagctgatcaaaatgctttgtgacagggatgggagacttttcttggttgaccaacatagaattgagggagaggaaataccactgattttcagcatttaaaaatttacaggatcatatggataatttaagtagtatagttttatcaaaacttaaatgtagattttcaaaatttttataattgaaaagtaggcatatttatggaaacaactgtagaattaaatgtatttggtcttgtgttaatggttggaaataataagtaagttagggtagaatattaagaaagaaaagttaattgctatgaaatttgtattgcaacatggaattattgtgtactctcatagtcaatgctgatacggtcacatacacatttgcattttaaatagaaagtctacatttttattttgtgatttttacaggcacacagatatgctaaatgtgcatatatacagaaaatgaaaatgacttttaaacatatccctcttcgccccctacccttttagtggcaaactctagtgtcggcataacttacccagttcacaggctcttggttcttacccagttcattggcccttgcctttgagtactaacttcctagtttccttcatactacctctttctttcaaaagcattttatttttaaacgattatagattcatagaatctgtcttcaaacatatatttaaattcttccaatattcaaatgtaatgtgatgattaagaaaatcttggccaaagcatgtgtgcatgtgtgtgtctcaatcaacacggttgagcttaacctgaactaaagaaaattaattggtccaattcattttattataagaaaagcaataggtttcttctttatgaatccccacttggccagtttcccaattgaggttcactaaagcaattgaatgctttttgtcttgtttgatttaaacacactccaaagtaccttttcagatctttcttgccttataaaaaacacagtacccaaggtgaaagtggtctgttcttgcatcaccaattttgctctaaaattgagaccaagcacattttagttgtgaccttttgaacttcagttttgacatctctaagatagggaactgcataccagctttccaggattctgtgagaatgaaatgagaaggtgcatattatgtgcaaattacacctagcagcaaaactcaaaagtcttggtcgggggggaaataatctctgaacactcagaaagtgaccagcctacaaactagcagatgggctctgcccaagggcagataaagcctaattcagggcttagaagcaacaatgaagaccaaacacacacacacacacacacacacacacacgcacacagacacacaccccacaccactaagtctgctttcaccaagtcaaaaaattgagtttatgagcaactattaaatgtaaaaaacttcgatttaatgggtataaaaaataaaattctaaaaccattagctgagatgtcaaaacatgcttcttaattacttttcctcccagcttaaaaggttacttttctcttttagattaacttggctttttttgaaactccaactcaaacttttctttgtatttggcacaagttttttcagcagatcaggaattgacaaatacgttgcttttttgaaaacgagtctcatacatccattcttattcctaaaatgctgttatagtctttcattttggggaattgtttttgcacagtttctcattatatcccctcttcagcctgcttcattgttcttaaaggtctttatagctctgcacgtgaggttgtgtgcattcttttttctttgtgcatgattcttcttaattccctctcctttaaaactggagctaagaagttttaaggacaccttccaaagtagcattcttcaagctgaaggatacattttaatgaccgttctgttccatttgcctccattacttcccaaaacgttgggggctcctgtgttattggggtgcagtgtgagagtgaaaaagaaaatagcctggctagtaaggctcctaggagctggagagctcctgcccccatgtttctccctctggcgcagcttggcagtgcagccactggctgcaaggaaggttgttttcttatccccgcatgcactggtctgacctgtctccaaaataggtcaggctggggcacagccagtttatgcagctgttgcggcttaggcttcgcagcaggcagccgaagctccttggccagccgggcccccagtgaactgataaaaattcgctggtgagccatggggccttccttctggacagtcctggccccctgaaggcttttagatgcaagaagactcctggattatgggggccaactctcagccaccaaagggaaatgttcttttattctgaagattgcactcttgttgacccaaacactcaagtgaaatatatactttgtcagattaaaaaaaaattatcgtatttatttttgactgggtaaaacactcactttgcacaaaattcagaagatataaatggatgtacggtgactagttttcctcccacctctgtctgctagtggccagtatcttgaccatttttccagacactctatgccaaccaagtaattacatttctctctctttttaaaaatattatcttccccctttggcagaaatggtaccctacctacaatataaacttttctgcaccttgatttttttgtccactttagaatatatctcaggaattattctgcataatgtcttgtttgtatagctgcatagtactccatcatactggcaaaggatgacttatttaacaacatgtagattgttttcaatctgacagcaccatttggcacacgtgtgagtttatttgtaaaataattcctccctggtaaggacaaaaggaatgacatttgtaattctggtagctttggtggaatttagcttctgcattgagaccaaatggtggggaagttcttagaaatcatggtgcaggagtgtgtttgcctttgggcactggcacaagaaaaatgatacgttttctcctatccctatatctgagtaggaacataggtttcaaaattactgcttagagttgttctgctaacaatgactaccttctggacattcctccaatattctattgcttcttcaaatggaacagtctctaaatacaaggaaaacttttttctttgacttattggttcctttttaaaaattctactttttccctatttactatttatttaagtttggcacgatcaaaagtagtctctttatgttaagcatttttatttttctttgtaagccagaaaaattgtgggtagttttataacaacttagaggcaacttattataattatttacttacaaaagaaaaattgtctccaaggtcaccaaattagggttgaactagtaagagagtggtttatgtataagaaaatatggtcttgtatttatttttcagaagtgctgccggatgctctaggggtttcttgagtttgggaatggctgacttttaatttgtaaatttttagagagtatatatccatgcccatctctgcacaaaagactttttatgtttttttcaaaaaccttgcttccaccaaatcatttcagtctattttcccttaaatctgatgctatggaattcagttgttgtcctgctgaatacctggtctacctaagctagacgtttcagcctgtgaaatgagccagaaaggactctgctccaagtatacgagaaatacaaccccctcaaaaccctcccgagaaaactggagctatgattgccagcgaatattatagagcaaatctttcaagtcatttcttcttaggaatgggcctttcagaaataggagaacaagttaggggcgaaggatttatttctggaaatcaaaatcttgatttggttttaaaaaaataagaaaaaaccaaaaacacgtcttctttcttgactgttcttgctgccaggcccggaatgtgcaggatgtagtgtgccagtaaggcaggaggatgcattttcttaattctagaactttcgtttgtgcttagatggaagatggctagcaaggtgccctcaattcccttcttgccttctctctgacttgcctatggaaatctaaaggggtcagtcaggggatggaaacaggcctgcattaagagtgtctacaaagagctaagaaaaatcaaaagcagcttttcaaaaattccctgctctgcataatttgggttgaatcaggctcatagtttgtggcatctgattactacctgtaaaagtatgcagctctccacacaggaaggaaagtctacagaggattaatatcaacatggaaaattttcatttgctcctcaagttgctgtgatgttctcaacaaacatttagaccatataaaataatttgcttctaggcccatagtggccaagctttaggttactgacagatcatcagactgcttttatctatacaggtgaagggaagtggcaggcagagccatcctccagggaacttaaacctccaggcttaatgtcagagagcaggtgttttctggggagagcagcccctttgcttctgatttataaacgtgtaagtttttaaaaataggaagtggaacataaattcatctggggaaaatgttttaattttccgtttcgtgattcccaagtagatgggatctggaattgttagttacattttgggaagttctgggtcatctaaaacaccctctgagaccatttctaaagaaagctgaaagtcaatttcaagttgagcaaataaatggtggtttcctcatggtgcccccggtggactagcagtatgccagagcagaatatcatttgggaattgatccagcgtggaaactttccaggtggtagatgtgcttggcttttatgcagacagggcacatctggggcacgtgtgtacatgacacacatttatcagagggcaacagaaaggcaacttttacagtttcttactagaagccagtgtctgtttgtggtcactggccctgccaagctctaaatacttgctgaatttttgtctgagagcagaagtcgaatggaagactggggatttagcatcatgtcagaaactacaaagagccaggcttaagagtgcaggggttagaggaatgcctgggtactgggcaagtccccattatacaggcaattcgctccaagtaggaggccaggatgggaactcaaggcctgttctactttggattcagtttctgggcttctcagtaaacttttagggccttggctcctctgggtcttctccttgtctatggaaagtatcagctggtctttcttggggcattcctgagcataaaaccaatggataagtgggatgaccatctcatcttgcttttgtaagaggctcaatgagttgtcagtaaaaagtagggaaatacaactcttgtggaggtcaaagcaagtactcactcatttcccggcatacctttgtcttatattatttgtcctttttaggaaaattgaaactaaaccattgcacaggactctttctttcttccttccttccttcctttctttctttcttttttctttctttctttctttttccttccttccttccttcccctttatttctctctttctttctttttctttccttcctccctcccctcccctccccctcctccctccttccctccctctctctctctctttctctccttctttctttctttccttttctttctctttctttctttctccctctctctctttctttctttcttcctgacagagtttcactcttgttgcccaggctgcagtgcaacagcacaatctcagctcattgcaacctccacctcccacgttcaagcaattctcctgtctcagcctcctgagtagctgggattacaggcgcgcaccacctcgtctggctaatttttgtatttttagtagagatggggttttaccatgttggccaggctgggctcaaactcctgacatcaggtgatccacccacctcagcctcccaaaatgctgggattacaggtgtgagccaccatgtctggccttggactctatttctaatggggtgccagtatataccttggtcagataaggagaccaaccatttctttattataaaatacaaatgacacagagagccaattttttttctgaatctttgttggctaactttcataattttattgaattactataatttaatgttactagtttaaactaacattttttcccctgaaatgtatcttttctatttttttgtaacatgaaaacccaagttaaattcattaagtaagacaatgactatctttcacattgaaatttctggtgcttggaaaattcttatggaaaaacttcaggaaaaataaaaagaactgtcactcagactacaatttataggaaaagatgttaccagaacaagtgtaggcttttcacaggcatacttgaaaattctcctaccacctaaccctcctctaccaaaccctttgaaaatgtttttccccactttccttccataaagggccctgtgggctgaccttaggtgaaaagagtgaagtcagtcttgggtgctgttccctctcctttcctgaatccctgtccctgccatttgccttgtacattcctactactattactactacaccacacacacacacacacacacacacacgcacaggcttgcactcagctctacctcattcacatagatactcaactggttggctgggcgtggtggctcatgcctgtaatcccagcactttgggaggcccaggcggtcggatcacttgagatcaggaggtcgagaccagcctagccagcacggtgaaaccgccccgtctctactaaaaatacaaaaattagccaggcttggtggcaggtgcctgtagtcccagctacttgggaagctgaggcaggagaattgtttgaacctgggaagcagaggttgcagtgagccaagatcgcaccactgcactccagcctgggcaacagagtgagactccatctcaaaaacaaacagacaagcaacaacaacaacaaaaacaaaagaaactcaactggttaagcctttaactggttaaatggaaagtatttgctcttttctaaaggacgctgagagctgacaacttaccatgaaggaatgaatccctaaaggtagaatttcaggtgtccgtgtttggtgggggcaggagataggttcctgatgcccctaaaatcacacctcagcagatcctgtcttcactgtgaaaggacaggattagttttgctatgaaggagctccttgctggtgggcaggacctgctagggcacaattccccattgagctgtctaggaggagacatagccaggttggaccaagagcatccctccaccacaagtggatttcccacacttcctcagtgccagggaagggccttggcttttgtcccttgggctccctggcaaaaagcagaaggacaagaagggtctctttggccaagagccatagactaggaaggaactgtggggctcatctcaccttagaactcacaaccttccccaaggagcagaagtctgggctgagctcttaaatccttagtggctcctggacagttgtcagaggtctgaagaaatgagactcccctcctctagaggactggggcacaaaggatgtctgttatggatctactagctgtggctgggggtgggggaggcttctggccagggagggccagaggcttaaatctccagagattcctagactctcagtcttcagactcttgagatccttagaaacaaatcactttggagcatgtaagccaaaagggtctcagtggaacaactgggattgagtccaccaatgatatctgggattcagaaattgccagtgtattcatggaccattttaatcagggtgtctaatcttttgggctccttgggccacactggaagaagactaattgtcttcggtcacacataaaatacactaacactaacacgatagctgatgagctaaaaaaaaaaaaagaaatcacacaaaaactcaattttttttttttttttttgagatggagtctcgctctgttgccaggctggagtgcagtggcatgatctcagctcactgcagcctccgccttctgggttcaagcgattctcctgcctcagcctcccgagtagctgggactacaggcacgtgccactatgccaggctaatttttctatttttggtagagacggggtttcaccatgttggccaggctggtctcggtctcttgacctcgtgatccgcctgcctcagcctcccaaagtgctggggttacaggtgtgagccactgcgaccggccaaaactcatgttttaagaaagtttatgaatttgctttgggctgttttcaaaagcatccagggctgcatatggcccgtgagccacgggttgaacaagcttgatttaaatgatcttgtgttcctattggactgtcaaagtgggcactcaggcttgatttgtgttttataaatattagataatgacagggagtatgagcgtctagaaaaacggtccacgtctccccaggaggggttcctgtaaaaggtgggttcagcaaggagctaatgaacctatgggaatctcacctttgaggtttgtttctgtgatttgtttctgaggatctcaagagtctcaagactgagagtctaggagtctctggagatttaagcctctggccctccctggccagaagcctccccaacccccagccacagctagtggatccatgacagatcacctaaaaacatctctgtgtcattagatttttgtaaatattgcaaaattaagatctattgtatttttttttcaagaggagccccctaaattgtaaaagcttcaggtcccacaaaaccgcatctacccttgtccttgttcagcagaggtggggagagatggtacgcttctgtgtgtaaagtgtgagtcagcacaaccatgtaacagccacatactaacagtgccaacttgtgtcttgcactttagaatacgcagggtgcttcttcatttcctgtgccttatcttgtttgcttcaagaagtcaaagtctgggtttgactaacaatttacccatatggttcttactctacacagcatcctctgtctttgtagggagccccttaggggggatcttggaccgactcctcacaagaagatgagaaatatccactcactgcataagggcaggtgggcaaaacccttaattggaggatgcagggaggcttagttcccttagctgtaaaggttgtgttaggcactttctagatgtttcttgtaggtctctgaaactattactgggacctggttgctttccgtttctggacctcattctcccctcctctgacaaatggaagctctgggcgaggtgaaggccacggtctctcccagctctagcaggctgtggcagctgtggccccatccacctctcagcagacttgtagaaggtacaggcagccgcttgaggaaatcatggggcccccaggcagccagggaatcagggcaaggatggagaggaccgggacccttcatatcttagaaggtgagcaactgctaccttgccttgtctttgagggaaaagatgcctttaggtgctggaaggaggtgggaaatgaagccttctgggaagaagcatttctgtgcagtatcacaggtgaacacaccggctcttcttccacgcagggagatgcgtgctttcttgtacctcttgtcaaagctgtggcttccagaagaggctggaaaggcctctgggtattgttttgagagcttcactttcaatgggttgcacatgattctgccgggaagttagaattgctacacaggagggtgacattccctctttcgtctatgcctggacgatttcttcctgtgtccagaaagggacacacaggatttctggctactgaccacaaagctagaagctgtctggtcttgaagagaaggagactcagacaatagtgaattcacttcagatgattctaagtcatatcttaaattaacgccctaatggctcacacttagcggttgtcccaactgattggggcaaacaagagtttgctcttaactaaaacacacacatatacactcacatatttaaaaatcttatttgaataaatcaaaattttcaatgccaaacagagtttcagagaaaactcatgaagattaaacaggagagcatttcaaatctgaaaacttttgttgtttttgtaaaaacattgaagtatttaaaaacttggaaagaatgtaagaaatattttttttgttatattgaagacaatccaaagcaaaatgtcatagcctatcaagaggagattttactaagtttcatcctcccatttttttactattttatttttgtggaggaaaattatttcaaaaatcatctacacaacatattgacttttcagctatatattctgaaggtagacaatgattcattcaaatattacactttttaattgcaaagactgaatggtaaaattaacaacgtaaaatgcactttgaaaatgtggtgggttttttttttgttctagacaattttagagcatataaaatatccaaactaatatttgcatgcataattttttgtatatacctgatatctatggctcaagctttattgtagtttatcttaaataggtttgtggaaacacatgtaagcaaatattgccataaaatatttactaatcttttaaaatagaagccaaacattataaaacgagaatgttaggaagaagaactataccctttgtatattcagaataataagccctgctatttaccatatgagtttgtctctatttttcttagtgattatcctgtactcagatcaaatatattgcaattttgaactttgaatcgaaattaaaatttttatttaataagagagaaagtcactacttgacctttagattaaagaagaaatctgatcttagccacttcacttctagctaacattaggatttttgttgagtaattccatacaaatcaaaacagttcaaattattgactcccttttccatatccacagacaaaactgactgattctgccacatgaattgggtcctagcaggtttgaaaaagttgaatttatgagagatatggcgtgaatttgtttaatatactttgaatagcaagataactgtatagcttttaaaatggcaggcattcatgatgctttgccaagcttggggtggtgagcagtactccatctgagtattgatttcctctacttattttttttccatgttttcttagggaagtgctagttgaggttcgaagaagagttgttattctgtttaactatataaaaacattaaaacattttagggaatgcgaaaatacatatgcttcaagttaaaatattgagacatcttggatattttaaaaacatttccactctaaagtagcaaaagcagactttaaaaaaaaaaacaaaaaacttcctttatagaggtggttacgtttgctggttaaaataatttgaacatttaggaagaacgttaactctacagcgttgagacatttactattttccattctctattaaaagagattttaaaaaatttaaagtacgaagatgattatttttatagttggtcagagggattttaatattaatataaatataaatttatactccttaagggaactgaaatcaacaaatgctaaaatgaaactatagaatgacttctacaaaagaagacaaatatatagtttgtcaaaattacttatattaataatgtataacagggcttagagactctgttgtacaattcattttggatgtttgagattaaaaatatccttttagaatttggagaaaatgaaattgttgcatttgagaggagagggagctgcagaacagagcacagtggagagagcatattaaggattctgtatattttatttcacaagtcctttgtaaagtgaatttctcacattaggattaaaacactaatttttctaggaaccaaataagtaccaaactccgaatttacttgcagaacagattacaatttatacctgcttttattcaaaagatggccattttctaatgaagagaatgaattgaggagcaaatttaaaaaattacagcaccgaatttgccatgttttagtcgaatttttatttgattatagttctaagagctgtcaaattacctaaaggaagcaatgagtttctcaataggaaaaaaaaaggaaaaagaaagggaaatgatccaaaaatgctgcaactaaataacaatcatttctgctaagctttgtgcagctttaaatacaattgaatattaattctttcagacctagttgacttaaaagctaggatggatcaggagctgatttttggcattccttcatttttccactcttttgttcacttgacacacagcttttatacattggctttgcaggaaccactggcatgatctccgaacaatctgtttgaggaggaaagggtccttccaacaagcagccagaggtttaataaaatactgcccatcctgtctaccttaaacagtagaagaaatagctgttggcataaaggtaccaatgaacttatgtttcctcgtgttaatagagcaaagaaccttcttggtgtttaaacacacatggacacacaggcgtgtgcacacacacacaagcccgaaaatcatgtggttatatttttttagttaagaagagtcacaatgaagccacaaccctgttccatactgctagattcagtatcatgttgtaaggaacatgctggttgaagaaattattttgtttattaattcaggttacatgtcctgccaggctggctggaagagaaaggaaagaaaggtgtaactttaagcacacactgatttgttcttattacataacaaaagtctatttctttatcatgttatcattcagttaataaaaattagctacaataacagcatcaacttaaaaacccctcaaagtccaggggattttctttcacaatgaacatgaatacggttcagaaatacaaacagtcaaaggataactttaggtctgaaagagaaacctggcaagggtaattgaataagcctgggtcccctgactgtgtcatggtgagggcagtcaacatgtcataattaggtttattgagggccattccaacaatctgcttctattcttcctgccttattgtccacagctaggcaaatagccaagggacaaaaggaatcaagtgctgacaaaacatgaaagaggaaaaagatttagctgcttttatcaaagaaactgagaaggactttgtgtaaataaaataagtgactggccatcccgcatttaggcaatgccgttttcattagaattaattcttgacatattggaagagttccaagggaaggatttctacttctgacaagtttaatttgtaaattaaaaacagttggttaaacatgagcctccatcaacaaaacttaaccaaagccatacacggtaaaggcctaagcaggtgaaaaagagaattactttgaaaacaaagtcttccccaaaattatgcaaattcttattacttcataacaaatgttacccattgaagcctacagcaggatgtctgttcctagagatttgtttagatcacattttcttcccctttaagcctctttagttgacataacacttactccatgcttgggaaacatgctggtgcttgggagaaggggtataatgacatttttaaagaactaaagctaatgcaacttttgtaactctacacatttcagaacggcttgctgcactttttttcttttttccattgaagatgagagtttcctctaagtgtgcctctgattcctaactgggataaacagtggcggctactatgcagtgtttcttgaactaaacattcatcagatcccaggtcaatgttgtctggtaggatggtttcatgcaacacgatcagctttgtggtcatgacttggtgacgcgaagaaagtgaaaccttcaggagagaggtccagcaggcatctggacaaggctttcatttaagtctaggaaaattctttgataaaacagctccttgtgaagttggaacacctttcttgttgcatttttgcagcttgcaggttaagctttagaaggcttctttcatgtggaactgaatttcagaagcatctttttcaaactgccaatgggaaggtagctaggaggaggatgctgtcatgaatgatttgtcccttgggaatataaattttacttgggtatcaaatacccctcagctttattgagaattacataggaaataagaaacctattacttaggtagcttcaatgactaggttatttaggtttaaaaacttcaaaatgctttacttcccttggcatcaaggcacattgccttattccttgacacttaaagtgaaaaaaaggtttttccctcaactcaaagaattatatggttacaccaaatagtgagtgtaaaaatactttaggaagtgcaaagccctagacaactgcaagatataatcgttactgtcaccagtaccatcatcatcagcatcaccattattactatgtttgggatggaacttgtcacagttatatttacatgaccatagcatcctgaggaagcattgcaatatgtgttccaaacatttttcttgtgtcttgttgagctggatttgcagaggtcttgaagtttattccacttacggattttggtaaagaatccataggacatcaggctgcccaggtctagttctacaccagatataaccatggctttatgaaaggctttggggttaagagatttgtcctggttcactctctgaatagttgtgatcatggaaaagtcactatgtgttctgagctggagtccttttcaatgtaggcgataatatttgctccactacctcaaaggattgttgtgttagtgaccgcgaacacatcagaagtcctgagcaaatataaagtattatttacttagaatctgttgattccttttgtactcattgaaacaaggtttggtagctgattgatttgccttcttgctgtctcagagtgcagtttaacaaggattaagtggatcttcctgtggtcagtctaaaatagacagaactaattctatatctaggacataagggacctagttactgggataacattgctttattgcaaagcagcacaccgctgcatatctagtgaaagactagtatgggagaaactgcttttaagggtttggatttgggcaaaataagtcttttgattttcacattgttctgatgtctgttggctcatgtcacaagattggaaggcccagcaggccaggaaggagtttctctggaaggagttggagatttatgcagattggctggctctctgacatttatttgctgccctttttcactctattttggcaactctgaaccagatggataagctcatggaaaataaggccagtgaggagaagatgcttttgatttccctgaagataagggaaacctctctctttttctctttcttttaacttagcagcgacaattttattgcacgaatgcaaaattggcaactcacttttggagaccgatggaaacatctgaacaaggacctcccttgtacgtcattgagggtaacataaactctgtttaccaaagcatccagtgaggggagagaagccctgacaatggtctgaatgttatgtctaccaggaggccaacggttcagtttgtagctgagcaccaaggatgctagtcggagcttgagctaagatgataattcaccaggactgaaatccttctttaatcatcaacctctctgcaaggagaatgatgaagaggggaaacagggcttactatttcactctgtaatcatttatgatttgagctgtattttaccttgtgttgacctctggtgctgttggtttgctcattctatagcctcagctacagtgttgcaaggggacaatgcagacagtggccactgcatggtgatttctttgtaagaaatggaaaaatattatctaaatgtgtagatagagagatacagttttactattttaggctcgaactaaattctttctactaaaagaattaagtgtttaagcacaaatgttcatttcaaaagtaattatgtcttgagctcactagcacattttttgtgaaggtggcattttttccttctatgttaaagtcatcacattttccctctgtgctacccatggcacacaatttcaaactgaaaatactttatctcggcatattgttgaactttgcccttggaatttaaatgttgaaatatggtattaaaaatggtgaagggatttgctgattaagtacgacttttttttttttttatggaaaggtgggagagaaatgtgcagcttgagaatttagccttattatttattttatgttgtcgttgtttgtagacttttaaaaaaatttgtttactcttgtttgtttgcactaatcactacttaaggaaaagtaagtcacaggccagcctcctcttcacgaagcctttagccatggtgaccgttcaggcataaaaacgtgcttatctgcaaatgaatggcagctctttgcttcattaaagcccctttctcttttggcactcgcattgtgaccctttgatattaattcaaagggcaattaaagaatgcgggccatctttgaagtaaggcattcagggcaagggtagggacgaacctgggcctctgatggactgtgcgcattcaacaggccttttcaaggcagtttgaagtgagtcaaagaaaatgggcaggagaaggtcaaagagaaaaaaggggctaaagaaacagtccgtatttgttcggagtattagccaagaaaactgcaaatagcaacaaaatgaaacagttaatagagcagccagacagggccatgtcaatcacttaacttgaacagcgttaggcttaccaaggctcctccactgtgttacctaattatcttgggaaaagcagtaactggaagtaatggtattgtatttctttctgcctactgcccagaaaaggtgataaatactcactgctccataattatgcaacatatatacataaaggagtaggagggggtggaagagggctgggggctcggagactgccttgaagtcgggttcctagtaaaacgtctgaatatggcacaaatatggcattttcaaacattagcatgctggagaatcgcttaactcgtttcatctggagctggctgaaatatgcatgatctctcctggaacaactcttaaagacaaacacgcttactcatctaggaaagttctcgttgagaaaaaataaaatagcctgcaagagctgtgctcaaataatatgaaggatttggcgaacactcccctctgccccccaaccccccgtggaaacgaggagattcagagtgaggtaggaaactcagctctttgctttccccgttgtgcctggttattgaaacacccttggggagaggcaaccggaaagccctccgtggtaaccgcatagccacagcgagttgcatatgttacctagagagcaggcggatagtaggtagggctgggggggttgattggatatttgattgctttctattagtgtggttaggatggatatttttggattccacttctattggtcatgataaaaagcaaaaaaacaacagaagccaagcacttctttgaaagtgtgagcaaaccggttgaaaaactatttccagattcccccaagggtgtatgggtaagggaggaggaacccaggcacgcacatacatgtctgcagataggtcgaatatgtgtttgtaattgcaaaacatgaccagcctttaaagaggcccccaggactctgctcagattatttgcaatatgggctgctacagattgttgtttgatgttgcatttgtgcataacaggttttgtttggagggacagtaatagatctaaaggatctgttatgcagctttttgacatactgttacagaatgtagctattaatataaaagttatggcctttgtaaaaagtccattattgaactaagtactcagttgctctgcattttaacaaaacagtcatatactgatgcttgaaaactttccttttcttaaaaaattccaatttgccagtcacccagggtaagtcgtatataatacgacgaatcacaaattatatgatttttaaaaaacatattagcaacttcagctactcagtaggatcaaccaataaattatgccttctgcctcgtttaatggtacagcagaacaatgtttgagtggttagggggtgtcactatctcagagacagtcaatagagcagtagctgcttaactaaacaggaatcacgttggtggcattgcaaatttccttaggtgtcttgggaaaaaataccacaaaatgtcccaaataataataaaaatgtaatttacagtaaattataaaataaggggaaactcaagtaatagaataagctaggatacttttaccaatagtaagcagtaactctcttccacttacagaaagaatagatttttttgcaataattttgaaaaagtgttttatttaaaaaaatacatagcatattttgatgccttttgaaagggtgactaaaagtcatatatctggaaagattaggaagtgtccatcatcttataatactgaaaatattgatgtaccttgtagctcacaatcagtgacgtgcaaagggaaatatggagtactttttaattgtattcctcctcatacctccttggtgacttgcagattttcatcaacttttgtccttctagtctcttttttcttactccttttccatgcaactcaaaaatgtgtgctatgaggagtgaaggctggggaacagtggtgagagagaacactttgagttactttttgtctcccattttaacttttcccaccttcttgaactatcagttagaatcatgtgcaatctccgggtaagagtgtggctgtgaataaatttatcaagataaaactggtcacttgttctgtttatgctttggtgaatttggattgaagtggctctatccagcttacagagcagacttacagttattgcacttgtagcgcctgctgtatacaggttcaatgccatgtgatttcataggttgcaaatgcaacaaactgattctgttatttcctaagctgcttcctagaagtacataaggaattcctgggatctgtatgatatttgggatctcatggtttcagtggctctctgaaatcataggggaagagaattttctctcccacctcctttggacatacatttcttcttggatctgacaggcattccccttcaagggccaggcagatagccacaaagcagaaataataatgtactaattgtaaagctaaggaagcagaagtttagagagattgtgtagcagctgttaaggggcagagctgggctcagaatccaggtttgcgcaaatctagaacctgcaattttaactgccacactatgtgattggcttgtgccttctgggaagacaggtggtattaagaaataactgaggagggggctactttcagggagtgggtctagtgactctgcagctggtagctctataaagtggggccaataatagtatttgccttataaaattgtgataaagactatatgaatatacaggggtgccaagttcttctcaataagcatcaggtattgttcttgttaatcttatttgtagggcctggcccagagggggctttcctaggaagctaacagagcctaaactttgggactcttgcacatatgaattcctgagtgtgctgagggtttgttgagtgctgtagtgttctaagtgaggaggggaaaccaggatgcaatcaggatatgtttccgtgtaggctccagcaatttgttgtgattttttttcccgttctaaacaaatattcacttttcaagccagattttgtacttgtaaatctatattcttttcaaaagaaagtctcccaaattttacaagcttcaagctccgcaaaacctggatcaaccaactactggctgtccccacactattggattagccctgccttcaaacccttctacaggtgtccctgagccagattctggcaggatgtaggagtttggtcattttgctgactggttgattaagagtttgattcacccacaggtatgaacaagaattctagccgttctgtcagattctgtgtgtatatgcataaactaaagaagtcaaaatcatcatcgtattctggaattgttaaaagtctgacttgctacatattctaactctcagtgtcctgaaaaggttagaggaaaaatcaaaatcaatctttctcccttccttccttccttccttccttccttccttccttccttccttcttttttttgatggagtctcactctgtcgcccagtggcgtgatctcggctcactgcaagctccgcctccaggcttcacgctgttctcctgcctcagcctcccgagttgctaggactacaggcgcccaccaccacgcccggctatttttttgtatttttagtagagatggggtttcaccgtgttagccaggatggtctggatctcctgacctcatgatccacccgccttggcctcccaaagtgctgggattacaggcctggctgagaagaaaaatcttgctccaagtattaaggatacacaagaggctaacagaactacggggaaagcgtagaacctagggaataatagtttattttaaagtaagggtaacaggagaaactaggcgttgcccagaaacccagttagagccttttatgagacatgtacagcaaaatccacacaaacaagccactcttgaatgcctactctatgctagatactggagaaaatagcgattaataagatatattctctcttttccagaacctatagcctggaggggaagatggtcacatgagcagatcacaacaatctcatgtgtttaagtactttttagagtccagggcactgtgggaatgcgggggatggtcgtctggccatccccaagttcaggaaatgcttccttgaagagaagatctcagagctgagtgttagaggatgactaatgagctgaagaagcaaaaaataaatggtattactggcagagtgaacagcatgggcaaaggtatggaatggtcacatggtgcatgtgagaatggcaagaagttgaagacaagaggtcctgtcaccagaatgcctcagtcttcaaaggcaaaagctgcgagtgaccattttgtaggagcattttgggaaagaacagagcctgatgcactgaagtggaaagtcctttggaatttaacaacttaactcttcctttgtgctttgttcaaggaggtaatctaagcatggagttacaaattattttttttctagtttctttctttttatgattttaaatttattttttgaaattatcatggtaaaatagacttttttggattactttgtgtgggggtgaaacttgcgtaacacaaaattaactgttttaaagtgaacaattcaatggcatttggtattttcacaacatattgcagtcaccagatctatctagttctaaaacattttaatcacccaaaaagaaaacctgggacccattaagcaattgcttcccaatcccccatccgtctcctggcaatcatcaatctgcattttatctctatggatttaactattctggttatttcacaaaaatagactcctacagtatgtgatcttttgtgtctggcttctttcacttagcattatgtcttagaggttcacacatattgtagcatgcatcagtatttcattactttttatggctgaataatattccattgtattatatatcctaatttggttatccattcttctacgatggacagttgggcatctaccttttgactattatcaatagtgctgctatgaacttgtatttgatcttttttggagtcttaacacatgctaatttatgcaatcatcatcactaccaggatagagcacagttccatcactccaaaaacctcgctttgaaattgtattctctactgctcttagtccctggaagctgctgatctgttctctatcaatgtagttttattctttaagaatatcttataagtggaatcatacagtatgtaatgttttgagattggcttatttcaatcagtgtaattactttgagattcacccaagtcattgcatgtgtcaatatttcacccctttgtattgctgagtagtattctactgaatgggtatgccacagtttgtttacccattcacctgttgaggaaaaacaaccagttgagggttttggctatttccttgttttggtcattatgaatagaattgccataaacatttgtctagaggttttgtgtgaacacaagttttcatttctctaaatacctagaagtgtgatttctgggtgatatgttaactgtatgcttaactttataagaaactgccagactgttttacagagtgactctatccttctgcattccaccagcaatacacaaaattcccaggtgctctgcatctgtgccaacccttggtattgtcaatatttttttattttgccattctaatatattcttagtgacatttaattttaattaaatgttttaattcatttttctctaatggctaatgatgttggacaacttttcatgtccttatttgccaaccatatatcctctttggtgaaatgtctattcaactcttttgctcatttttaaaaattgttaaatattttgttttcatattgttgagttttgaaagttcttcttatattctcaatgcaggtcttttgtcagatatgtgatttgcaaatattttctctcaatctctacattgccttttcattcttttaaccatggcttttgcagaatgaaagttttattttgatgaagtccaatttgtcaattttttattttatcagttgtgcttttaagcatcacatctaaaaactatttgactagccttggtcctgaaaatattctgaaaatatagactttacatttagttctatgacccattttcagttaatttttgtatgtggtggtgttaggtttagggcaaggtttattaatgtattttttgcatctgtatgtctaactgtttcaacactgttggttgaaaagtcgttcctttctccattcagttgcatttgcacctttgtcaaaaattgactgtccatatttttgtggttgtttctgaattgtctgttctgttccatatatatatctgtgtctttccttataccacaatgtcttgattactgtgacttcagaataattcttaaaatcaaaaaatgtgattcctctaactttattcttctttttaaaattgtttttagctattctagtcctctgtttgtccacataaatttgttaattagtttgtctgtatctacaaaaaaaaaaaccttctgagaacaatttactttcaaaagttgttttatattggttttaaagagttttagaaatcaaagagtgatgaaaaaaatgaatctatttatattacatacccaattaataaaattatctgccaaactgaggatgtcattttattataaatttttcctctatgcaagtgctcagttttagtaaaatggtgagggggggttgagtaaagtatgataactacaccagaaaaaaaatagaattgtcatgcttttttttgtttatttgttttgttgtttttaaaaagaatggtcatggtagctttatttgttatagtccaaatagggaataatccctaagtccaccaacataagaactgataaaatggataaataaattgtgctatatacactacattggagtcttgttcagtaataaaataagaatgaactactcacatatgcaacaacatggataaatcttaaaaatgttatgttgagcaaaagaagccaaacatatgagtctacgtatactgtctgattctacttatctggcattccaatacatgcaaaaccaatggattgtggtagaaattagaacagtaactgcctcttagatgaactgaccaaaggggcacaaagaagctatttggggtgctgggaaagttctactttgggaacccattgggatactggttgcctgtcatgcttgtttaaactgctttactaatttgtcaagcaacactcaaaattattttcagagaacaggaaggcaaacatgaaacatttaacgtacattcataaagaaaaggtcaatctcctcatggcttttatatcatttatttaatttatatagttgtaagcatttgggtcctctcaaaagcatttgcaaatgtgcaatattataaggtttgcaggccaatgttctgactcatgcattaaaaactgcaatatcaggaacttgggaagggaagtagaaggtaagaagttggtgtttctttttctttttcttttttttttttttgttgttgttgtttctgcttgagtgaagatagaaacccaccctctgttctgcctcagaagaggacaattagagaaatattacaatcttcttcgtatcttttcctcctaatgtagaatttcattgcatagttccagtgaactttgaatgctgtgttgtaatgttccatacaaattgacatgtgtgctaggtatttagattttttttcctagccgtttgctaacatttcaaataggattaaaatttaatacttaaaaagtcaatgtgagcattatgaaaatgagcttaaaatataattaaggattcagcaagtgagcctcaaatttggctgaggctgcctgtgaaacccttggctttttgagggaggctgttagcagttggtggctgtggatatcctggcagtccactgcgtgcatggcagctctgacaaaatcgttgtttgctgatataattttggaactttgggttagataaagtctgcatttcaggttactttgaaaaaactgtatattgagatgaatagctaaggataaagtttatcagtatagtaattttaggaattctccattgagactgcactcactgcattgaaggatgtggtgctgagtgcttctggccacagcctgagtccattttaactatttgtaaaaagtctaagtgactctaggtgattattcagtggttctaaggaaagcattattttaaaatcttgtgttgcggcatggtgcagtggctcatgcctgtaattccagcactttgggaggccggggcagatcacttgaggtcaggagttccagaccagcctgtccaacatggcgaaaccccgtctctactaaaaatagaaaaattagccgggcatgggggttcacacctgtaattccagctactcaggaagctgaggaggagaattgcttgaacctggggagtggaggttgcagtgagctgagatcatgtcactgtactccaacctgggcaacagagagagactttgcctcaaaaaaaaaaaaaaaaaacaaaaaaaaaaaacaaaaaaaaaaaacaaaaaaaaaaaacttgtgttgcttgaaatagttttttcattcctaaaccatgaccttatggtattgaaatagagacatgtgtaaatgaaagggagtttgatttcttagttaaagaacaaatagaaaaatagcacagtaaaactatgatcatccagcagtgatcattatgaagctttcttttcctgttgttttctttttgagaaaggtcttgctctgttgcccaggctggagtgcagtggcatgatcatggctcactgtagcctcgacctcccaggctcaagcaattcttatttttctatagtttttttttcacatgtagtcttaatttgccacttcaatcttgtgatgtacaacagaagagcattcagttccccatcttaaagataaacagaccaggcatggtggctcatgcctataatcccagcactttgggagactgaggcaggagaattgcctgaggccaggagttccaggccagcctgggcaacaaagctagacctcatctctacaaattttattttttaaaaaattatccaggcccggtggtgtgtgcctatagtcccagctactctggaggatcactgagcccaggagtttgaggatgcagtgagccatgtttgtgccactgcactccagcctgggtgacagagagacatcctatctcttaaaaaaagaaagtgaggatcagaaaagttaaatgaagctaacttcactagtaagtaactgctggtaagtagcagaatcaagatgataaactcattctcacaacaatctgaaatggcattttacttttaggtaaagcaaattcttatctatgtctgttagaaaagggaaagtatgacttcaaagtcctgaatttctgatcctgaggcaaaatttattaagttttaattttttttcctttatgacaagatgaaaaaaaggtaagaatgctaaattgtgtatcaactctggctttgaaatgtttaaaaaatatggacacttgaatttttctttctttaaacacaaccggtgttatttcccaatgtcacttctctgcttagttataaacccctttgattttgatgttcttaatagatgttgattggtagaatgctatgcctagtctttatatttgatatatatcatgtattacctgtaaagtgcttatttgttttgtacaatctcttggccttaccttttgatctagatataaaacaggcagaagcaatgtgattcctgcctttaatgtcatatgattccaggaattaagaatttccatcgcagaatgtatcaggaagtggagaatgggcttattcaaacagtgatgttctgttggataagttgtgttagttgcttccgtgtgtgtgctcattttgtggtaggtgttcatttcgaggtagtaaaagtaggtttttcctttcgcaagaaaccactcttggaaagtagatctcagctgctgcagatgtggcaaaatacagaataaatttagttgaggaaacttgaaatgttaagattatttttttgaaaaaaaaagtcttcaggaaggagtttcttaattctagtcttcttgttgacgctggcttagtagctcactccacagtatgcttcagggtttgggatttgtataaagtgttttaaatcagtgccacagtcaaccgcagatttggttctagagaacaagactcaggaaaaaaagaaatctcagcatcaccaataagagactttttgttgttgttaagaactgaacttcagatccacacattagaacattagaaaggtataatccatactccataaaactcagattaagaaagtcctccatgtatgccatatattctgtaattgcaaacagtatgcgaggttgggaaatcaagtcccaagcttaaaggttcttcctggggagctgcagaggaaggggagaagcatatagatgcatgtcagtttccagactctggggtgaggctgttgttcttaaaaggaacaaggcatcttcagaaaaagtgtgattatcaaacaacaggtcaaagtttatctctaggtcaacaaaaaggcaggggcagggtggtggtggtggtgatggtgtcatcattctggctgtgaatataagctccatatttaaataaatttgtgataatgtattcagattttttttcaaattaccctattaggtttactaagtattatttaataatgaaatcagaaaattgttcttactgttaataatctaataatgggtaataataataaagtttcacacacattacctaacttgatcctcacagaaatgctatgaggtaaatattattattcccactatgcagatgaaataattgaggcttaaaaacatgactgcttcctttacgcagacaaatatattgttttttccaccactatagttccctctgaaaaagctggatgatgtaatatggattcatctttttcgggtttgcttttatttttgcttgtttccactagggttggaggattcatcttaattggatttaacttaaaatatagacacacttgaaagcactctagaaaactaagttttagaatggaagggtgtctcttgaatagaatattcctcttttcttggagcagttcttttttccttcctttttccccagaagggtttgccgtccatccctattacaaagctcctctgtgccctgcctggatgttctcacagaggtggtgtgggaactccctgagccgggacgatgcagtcagcagcgtgggggtgaccctggggaggccctggtgggcacaaaacagccccatttcctgcccagccatgcgctgccttgagcctcaggaggccccaacttctgacttctgccctgctgtcagatgcgaagggccctctagtctttatcactctttattgttttattttcttaagcataattccctgggagaacatatcatacagtgactggtacatgcattcttactggcatttgaaaagatgaatggagacaggtagtcaatttagatgactttttcaacacaaaatgaaggttgtgtttaaaataacgtctggaaaacaggcactatctcagtgaaagtccctgagaacaagtctcaataattagcatggcaaaacagcaaataattattttttgagcattcactagctatggagtttcaaattttttgtagctgctggggtagaaaaataatcattctagcatagtactatgcttaaaacataaaagtacattattaattggcccttcatatttggctctatgagttaaaagacatgaaaacaacatacatcttgaattgttacagcataaaaacataatggtaaatttcaatagtaagtgagtgtgaaggaacagaaacttatctgaaggtcaaaaaaaaaaaatgctgagccatttatgcagcggatgtttactgtgtccctgctaagagcaaggcacctggagacatttaagcaaagcatagacattgtaaaatatatatctgtgttgaaattatctttgtccccaactactatttttccttaccataaaagagcccatggtgtggtgtgtctgtgtgtgcccattctgtgactatttcccagattttacctacgtattgattatatttattgtctcaaattagctttattgtacaaaactatctcacaagtacagggtccatttcaatgatacaatggaagcaaagtttagagtttagtagtaggtggccctatctgtctttttagaggtagaataagttttgggccagtctgtcgaatttcaaaatggaaagcgagttcttcaaaggcaatgactgctttctgagatgatgtcaggttactttctctaaaacaaattgtgtcattgaagcataacatgaaaaatactgcattattcactttatgatgtttaggaagagaaaataaaagagtattagttttaaaaatgctgttatatacagtatttaattttgcattcatgagaaaatgagacttccagactgctggtaatgaaaagttaattccttgcagtagagaaatcaaagagcagtttccgagtctctggggccgagggacttggaggaggttagggggtctttgtgcctgagggattgtctcagtgggagtggagagggagagggaaggatcaggaagtgcctgcctcagtgtgagcccaagggatcaaggaaggacggcaggggtctctgagagggagggatggcattattgggatgagaggacgtcctgctcctatcaaggcgtcgtccagaggatggtgagcactgtctgccgggctggctggagggaagaacggttttttgtaaacagagaaaatcttcctgcaaattctgaaaacccttacaaggatctgccttatggccagtttacctccttggaatgtaattgattctggcacgttccaaatagcagaggaagaaaggagcccatgactctaaggtttcgaagatcagggtttggtacaaaacaaagctcatcctcaaggtaggtgctaacaactttgagtaaataatataatcggggctgggcgtggtggctcacgcctataatcccagcaccatgggagggcaaagcgggcagatcacgaggtcaggaaatcgagaccatcctggctaacacatgctgaaaccccgtctctactaaaaatacaaaaaaaaaaaaaaaaaaaaaaattagctgggcgtagtggcgtgcacctgtagtgccagctacttgggaggctgaggcaggagaatggccaatattgtgccactgcactccagcctgggcgacagagtgagactctgtctcaaaaaaaaaaaaaaaaagaatataattgggcatactgttactattctattacagacgtgtgaaatagcatgtgctatggccacactgctaaatatgacagatcacggaattcactctatgtgcatcttccttcaaaatctaggtaggtcagtactttcctaacatcaaggtatctgagttgcctgcaagagaacctgagttcctatatgtaaaatgccaagaacactgactggctgacatggtagatgctagataggtatcagtattattacaattaatctttgaggcccttatttaaaaagaacatttctgggaccactttaagtgattttgatgttgcagactgaggtggggctcccaagtcttcctttttaacaaagagctcaggtgattctgatgcaggtgctggtagatgatttgcatgagatcacctagtggggattctccagctaggtggtctctatactgctcagcctatctccttgaagccttcaccatatttaggcagggcaggcattttctatcacatgcctccatagtggaatgacctcattcagcatcaaaatcagatcccatgactcacatttttgaaggctgcacattatcttccccactagtgaaatctataaatgaatgtggcctgaacagaacaaaatctcagtttgtattaatgctgcaacttgccctgccaacttcctgagttaaaaatgtaaagcttgccaggtgcggtggctcaagcctgtaatcccagtactttgggaggcagaggcaggtggatcacttgaggtcaggagtttgagaccagcctggctaacatggcgaaaccccatctcttctaaaaatacaaaaattagccaggcttggtggtgcatgcctgtaataccagctacttgggaggctgagacaggagagttgcttgaacccaggaggcggaggttgcagtgagatgagatcatgccactgcactctagcctggccaatagagcaagactaagtctcagaaaaaagaaaagaatagaaaatgtaaagcttaatagtgagccttaaatatatgagagtctatgataaatgccatgttgatgttgagtttttgacatgtttatactgtagagtatcatcagaaacattaaacaatatgaaataatcatttattaactctctctaagggatcttttggtagttctagctagccacaatgttctcttgcatcctaagtaattatgacactgatggagacatcagtttagggcagatccagagatgggtctgccagatgcctttttgataaaataatacttagtgactgtgggaaacccaaatttccaaaggtcttcctggtcatctaagaaactgaatttcagacccttagggtaaccttatatgtgtgatgcactggacaacgcttattgcaagaggaagcatgtcagaacagacgagcatatttcatacaacgagaccaatctaaatataaggtgagaaaagactgacaaaacgtaagatgaaaaaacactgtgagagctaccctcctttccccaggcaaataacatatcaactgaacacaaaatgggattagaagtccaactattatctggttaaccatctaacatgtctggttgaatacttaaagtgaaacttttttttaaaaaaaaaatttgcaataggcatttcctggagattggatgtcatattaaaaaaaaacttgtcatttgctgtactgtgagctctgttctgctcagctttttatgtgcgctgctttgcagataactggaaacaatgcaggcactgcgtaagtatttggtgaataaatgaatgtaaatttaaagaaacattttggagaaaaaaaaggccaggtgtggtggctcatgtctatattcccagccactttgggaggccaaggcaggaggattgcttgtgcccaggagtttggcaacaggctgggcaacatagtgagagccccatctcttaaaaaaaaaattagtgggatgtggtggcatgcttctgcagtcctagctactcaactactcagggggctgaggtgggaggatcacttgagcctagaagtttgaggctgcagtgagctaggatcatgacactgcactccagactgggcaacaggctcttttcttctgtctctaaaagaaaagaaaaagaaagaaaaaaaaaaaagaaaagttttgtagtgaggttgttaaaactttgacttatttttttcttgggaaacaaaacgtatgtctaaatgtatgtatgttgtaggttgtgtcctattctctggactctggttatatctttgacaacttgttttactgttatttctgtggtgcatcacctaggtttgttcagagtcttagtttgcatgaagttttggatgctaagtcatactctaaaatgcctaaaatgtctttagggtttgagaaagtcaacagactaatgtcaaaccaggatatgcatttcatacctcaacactataatttacctgtattttacattctacaagcactctgtgttttccaaagtctgttgatacccctgtaaatttgttcctcagagctacctgtggagtgttagtactccttcacagacagggaatctgggagccataccatttaggcagctcacccaactgatcatttgtgttgagaacagaatcctcggaatagaacaacagttctttctttcatgctgcttctggcttctttgtttactaagtaggtaagcttgctgctctggtggtggccatttagatagagatgatggaagtagcctatgggtcaccagggcataggattggggagtgaggtgacaactttggttctagcatttctgggagagtagttggtggttcatgtcagaggtcactgagtctgaagtcaaagcaatgatcatcagtaagctaaactaatcatagcaccaagactccaggccacttagaaaactactgtcctgttaaaaagagtttcctggttctcaccctttttatgaactgagcaatagctcagttttggggtataattaattcataaattaagttggacacctgccctataaggttgagtaacatcacagagacctgggccctcatgggaaaaaagttccacacaactctggattcattaacatctgaacataggagaataacacgagatagggcaaggcatccctccatccacatggcagagggattgggacttgcattatgctgtggataatgggagttttgagtcttagatggtgatagtgatgatgggctttggtggtaacggaatgtggggatgaagtttgtcacaaaattcataaacacaagcttctgcatgagagagattgaatgttaattctaccttcactacagactagctattagtatataacctctctgagcctcgttttttcaatctgtaaaatggggtataataataatgttgatttgaaaattggatgagggaaagcaagtaaagatgcttggcatggcacctggtgcatagtaagcacctataaaatgttggctatcatatagactaggcaaatatcttctgtcaaggtccatatagtgaatatttttggctttttggggccactggcctctgttaacactactcagctctgctgttgtagcatgcggccatagaaaatataggaatggatgagcatggctgtattctaatagactttatcaacactaaaattgtgtgtaattttcatgtgtcaatgttactcttcttttttcaaccattaagtaatgtagtaaccatccttagctcagaggtaaaaacaggcaatggatcacatttggctgacctttggaatagtctgttacatcttcgatttggaggtattgttttgtctcgtagcactccatttatgtttgtgatgatttttcttagagttctgttggtaaattctggttatgtagcaaggcaatctcagaaagccatggtgaaattgtgatgggtaagaaaaatgaaaatcaaaaccacaatgagataccatctcacaccagttagagtggtgatcattaaaaagtcaggaaacaacaggtgctggagaggatgtggagaaataggaacacttttacactgttggtgggaccgtaaactagttcaaccattgtggaagtcagtgtggcgattcctcagggatctagaactagaaataccatttgacccagccatcccattactgagtatatacccaaaggattataaaacatgctgctataaagacacatgcacatgtatgtttattgtggcactattcacaatagcaaagacttggaaccaagccaaatgtccaacaatgatagactggattaagaaaatgtggcacatatacaccatggaatgcatagtaatgcagccataaaaaaggatgagttcatgtcctttgtagggacatggatgaaggtggaaaccatcattctcagcaaactatcacaagaacaaaaaaccaaataccgcatgttctcacttataggtgggaattgaacaatgagaacacatggacacaggaaggggaacatcacacaccagggcctgttgtggggttgggggagggtggagggatagcattaggagatatacctaatgttaaatgaagagttaatgggtgcagcacaccaacatggcacatgtatacatatgtaacaaacctgcacgttgtgcacatgtaccctaaaacttaaagtataataaaaataaataaataaataaataaaaatgtattgtgatgggtattgacagtgttcccccttcacctgagggtggttatgaccacaaagtggttacctctagaggacagtggaagtgttgggggagataattctttaaatgcaaatgtgcattttcaattttgtttataatccaggagcagtggcagtcagcccaaaacttctatgttaaataaatctccctcaaatgatcatgtgttggaactgctgagataagtgaaaatttgtgttttatttatttggaagtgtgaagaaatgtagagaaatttagtttctaatgaatcatttggggcagaactgcatgaggtcctgtgtcatatttagaatttaagaaatctcagaagagaataaagccacatctttggatacaaataaaggagaaatataagatagtatttaggtaagtgaaattctaaagcccttgtccttgaaataaccaaccaatctaaccaaaaacattcttttttcttgtaaatttctaattgccccaattcttccacttcagtttctagggtattaagtttggcctatgtctggcccatgttccctttttcataatacctttttcgaagtttctgtggtgaaggtatttcctctgcaagatgttacaaagtgaattgacatgcatagaatttttagtggtatttgatttttttcaagtttgggagggtactagcagtatcattttttagggacaaaaagattatacatgctggctaaaatcttgaattgactcaaggttgtttgcaaattctcatgaaaataccaaagctttttgggggttacttcccaataatggaactacttccattgcacaaaagtaatacatattcactacagaagatacattcataatagaatttcacaaactatttcagctgtgttctgaggcttagtgagtgtaaagacatgcacatggaggaaacagagtgatgggaagggtgcaatcacgctcataagatccccctacctgtgataaagtccaggttctcaagacatttctttaagggtaggacataaagcaaaaaataaaaccacagttttattcatgaggttctctgaactatccatgacctatatgtctccatttactcataagtcaaggtaggttgatttcaagtggaattgggaaagaaaccctattctcctatcaaagactctaggtagcttataagcatgaatattgattgacttgattgttcctgctatttggggatcaggggagggctgtcgttactgttatttagggatattttatactgtgtcattagcaggaagggcagacatagaaggaaagtgtctttcacttgaagactggcttcaccagaggttcatgggcagaagtgaatttacagtggagagaactgcgggaccccgggggcaagggcttcttctgaatctctgcaaagggcccttacaatgtgtcacgtggtcatgtgattttgtagactatgcagaagaaagctagttttgtgttcttaaagtggatcttcccaaatcggaaaagcttcaaacctctgcaaaacatggacctacttctaacactgcacttttgggctaggatttactcaaaccttttttgaaacgggagaagaaaaaaacctctttgttgacaaatatgtaggactctggaagttgaagagtaaacctttcctaaggcctaagactgaagatgaaaatgggaaaaggaaagatttactcaaggaaagggtctgagctgagagaggaatggtattgttgatgtcttcttgtattcaaagagaagaatcacgacatttgagaaaaaaaggggcaagtgtatttagttgatcagagaaaatgacttcatgctcttatgtttttattttttgtagaaactgaaaggcttaatataatgcctcttcaatttaattcttgctaataaagtttatttaattggtgctttattatctactgtaataataacagtctggtgggggtgctgctgctgctgaaaacatgtaagttacatgaatgttacagtttactaaacacgttcacagtttttttctccattggtaaatactgaaaccaagaaagagcctccttgtttactgtctgtgaatgcctccaaaattaactgcaagcctatgaaagactgaagtagaattgatcacatggtcctcagtcactttccttattttgggataatgctgtatcataccatcagccagtttttcctcctttcctcagattttttgtagcattgtgacagtcaaaataaccactaaactttaccacacaaagacatttctcttaaaatgacctctaattttttgtttacaaaactactcaacaggcaagcaaagaaccaagctccctcaaaacctgcttttagtaaggcaatgtttgcattttttagatttgtctgtataaacttactagttgctttgctgacctctgactatttgaccctttaaaatgaaaaagtactgctgggacacacagctaaatggatacaaattcaaggaagtggtcaatcagagaaataagtgtggttgcaacaagagttgacctgcaagttgtagtcaatagtttaattaccaaggaaaggcacggtgtgtatggaaagtacaaaatgctcttgcagtacagagaagggaggggcattgatggctgtgaggttcagtgaatgctttgtgaaactgggctttgagacctgcatgtggcattgtgtgaagatgtgcagaaaggtattcaaggtagcacagacagtgagggagccaagttatgacaaacagttggtccattttggcaagcacatgaaattctgggaagtcgttttgttccactctaatgaaaactttaaatgccataaagtgaattcttagcagatttttgtgtacatgttcagtttcacattaattactagttttctatattttacagctaatttactttggaatttattattatttcttataaaattggttattaatcagtaattgaatatacatgttatttgagtgaaaaaaatttgtgaataatactaagcaatagatgatccagaggacattttaatgcatatttagagtgaagactgatgattatctttgaagctctgacatgtaattgacccgctgagactttgggcaggttcttttatcaatgtcatttttaaaacaaagataatatccaactcacagagtagttataaagatgtaatgaggtagatataatgagatatagtgagaatttaaaaatcagaaacaaaacagcattatataatggttagatgtaaatagaatggttaagacgctaaaaaaaaatttttttttcctctctgggcccaattatgagtccacctcattccactaattttcagattcagtgggtttgttggtggtaggaggactctagctaccattagaatataggagtaaattcacctatagatccacagaaaaaaatgagttgatcatgtgataaaatgaaaaaagccagaatttagaactcaagagatataggtttgaaatttaacttgccaccaagccagttgatgatggaggtatcatttcattcctctgaaactcagtttttgtttcttgagtttttcaaatctagagtaaagagttttctgctgatatttaaagtgatttctaggttttaaaattctatgctaagcagcacatttagcacaaaacatgaacgtctctgactaatagtgggaaaaaattttaaaaaactatttctaattttctccctgcaatttagttacattgttagttacctgggatttgtcttcctgtgcttccactggttttcttctcttgtcactctctctgtgcagaggcttaaactcagccattcacactctcatcctgctctagcttcttctatcagaaagaagaaaatatttgaagagccccctcctacttcattgaggcctgaataggaataaagacatggacttgggagggatgctgtaaggacaacaatctctgatgacccagccctggacaagctttcttaaacttgtggctaacttattgtgagaatagaaggagagatgtataagtgggttcaatgtttgtttggatgaattagacacctgagttatacaaagacaatgagaatatatgtgcatttgtctcagccctcatatagagaaattggcaaattttcatatctggccatccaaatgcattcacaggtaaatatgaacaaatcaaaaggagtagtgctttataatctcagaaaacaactttaagaaagttaaattttcaaatataaacaatactattaaccaagcaacttgtgctattgctaaaataacaaggataaattcacttgaaaacttgctggaggaaagagttttatttacctttttaatgtgtaattaagaaagtttttaaaaacttatattttgttaataattacacagaaaaaaagaatgcgaagaaacacagcaaaggagttggatctgtctatatctatctattgatctattgatccatccatccatccatccatccacccatccatctgtataatataattctctaatttaaaatcaatagcaattctttttggttctgggactatcattattttttatttttagacattgctcaaattttattttataatgtaatgtacttttgtagtatgaaaacaaaaacgcacaatgaaataagaaacatattttgctcaaaaagcttttcttaggaacgaacatgtaaattgggtggtgaagaatgagcttgagtttgaactgaattggcagtagtttctttaaatgttggcatctgtcttgacatagtgatgggatgatttccagttaaaaccatgggctggtgtgggtgggaagaacgagtggggctacttttggtttttacccaggaaaagctttaatttatttaaagttgccagggattaggacacattgtcagatcctcagcctcaacttcagtccctcagagcaggctttcctaactcagaaagccttgtcagaggagaattttggggaaaaagtggtcatggtgaacccattgactctgaaaccacctattgctttattttctatccttctttgctagaaaggaaagttgatccttctctctctctctctgtctctttttgagacagagtctcgctctgtcacccaggctggaatgcagtggcatgatttcaactcactgcaacctctgcctccagagtgcaaatgattctcctgctttagcctccggagtaagtgggattacaggtgtgccccactacacccggctaattttttttttttttttgtatttttagtagagatggggtttcaccatgttggccaggctgttctcaaactcctgacctcaggtgatccacttgccttggcctcccaaagtgctgggtttacaggtgtgagccacagtgcctggcctctcttctcttctttctcccctcttttattctcttcagttattttctcttctctcctcccctcctttactctctcccacatatcacttccttattcatttccctccagttctgcaagattgtccctgaaaaggcaatgtggaaaagaaaggcagttgtccaataattcatgcagaaacctgctactgaagaaattcttgtgtttttctggtgttgggtacctgacctattcacattggttgtggacactaataaaaatgatcagaaggtgaattgctcacaattatactttgttttgcctgtgcagatccatatcagtagacatagagaagacaagaatttgcctccaagcaaatatattcaggttttccccatgaaaatcaaactaaatgttggcatgtgcttaatttcttttaggctggttgcctgacttttgttaagcttggccttcctgtttaggccctgaggtatttgggagcactgaatttatttactttcatagctaccttaattttattctatttcttttctttttctttttttgagacagtctcgttctgttgtccaggttggagtgcagtggcatgatctcagctcactgcaaactctgcctcccagtttcaagtgattctcgtgcctcagcctcctgaatagctgggattacaggtgtgcaccatcatatccagctaatttttgtatcttcattagagacgggattttgcctcattggccaggctggtttcatacctctggcctcaagttacctgcccacctcaacctctcaaagtgctgggattacaggcatgcaccaccacactcggcctaatttttgatctcacagtacagatacaggtcctgggttaggtgaagttgagtaactttgatctttgttttggatttttaagggaattgggaatgagcaagagctgaatatctttttttttttttttttttggtgaacaatatactgtctgactatgggcgggttcttctgaagaggaagcagatgggagattggatcatgcttattgtacacattctgggacttctacaaatacctgcaaagctttggtggtgatttttctctctcagtcttaggatgtagggaacattcttcacatgctattcccttatgcctggtaggactggttaacaagaaggggaataggtgcagaggggataacatttgctgaggataaattgtgtatcaggaattgtgttatgttttgcaaactatctcctttccttaaaaaccagtctttggagcagatgttttaaaccctactttgctgatgagaaaatggattcagagggttaataagcttgtcccaaatcagagaggaaggggccatctgggtatttgaagtagtttggcctctctcctaagcagtaggacacatcaccatgacatgaaacttcctttgcccaaacctttgatatcacctcttctaagttcaatggcaactgttgcttagacacaaaaagacaaaatttcaaaaagcagctgtccctacctaaggctggtgataaatcatttacatcatctatttagtcattttgactggtttgccaattcctcccctaggtccattggttggatgtgacactaatctgaaggaccaccttgtagacaggagacttatacttttgcacgatgaaggggaggaatcacactctcttctcattcattatcccctcttcacggcctctagggaagtacttcttgcacagtaggtatcccaagcatgatttctgatgatgaccttgatgttgctgctaattcctttgccagcaaggattaagctcagccttctctgttgcctccaggaaaagagttttctcctatgttcagttattacctctttcaatcttccaacaagcaataattgacccagataagatttggattttcaaaacaagcttcctgtgctaccctttttcttttttatagaacccaagagaagatgggaagcaaagaaacaatcttgaaatgccatatgggaagtgtcgttaaaagcatttatgtattattttgatctttatactaaagatcacagaatctatgcctctgtttcttagtaaataacatatctaggtttttcagctttgatgggctatttaatctttctgttgccacagggcatgactagattaactcctatgtacactgacactttcttttgccttagtggaaagagtactggaatgagagttttactttttgagtttaggctccatatattattcatatttgcatccctagtgcaaaggacagtatcagccacatctcaggcatttaataaatgtttctttcatgatgtgtcatttgagataacctcacttgctctctctgggcttcatctgtataatgaagggattggttcagggctcctttcaaggattctgcaattttgtaaatgctttgtcttggcattttcaattctctactcatttgtcttcttacttctttgcataggcttttggcacaaaaagtgtagtatttaactttcttctaaaacctgccttttttttattttccaaacatctcgtgtcatgctaatcttggcaaagtttccttgtggataaagctgtttaggttttgtgtatctttcggtagttttgtcctagtaagggtgacaggagaattcttttgttttctacctgctccaagaggctctctgtataactaacttgttatctcctttacatattgaacctttgtttatttgttgacttttaaacaacatatgcacacaacagcaaaaatatttgatagtggaaaataaggatgaaggcaaagtactttgtctttgtcaattatgtcatgagacttattgaacactcatgtcttattcaaagttctgtaaatatagctaaggtttagatttcataagcagagttctttcttggtaactgtacagaacataatttccacctacaccaaccaccactgaaagtattactcaccttttatgcttatgttttcacaactgatttacagggttgtgatatctgagtcctagctcagtggatcaagaagaaagaagaagtgaagatattggccacagtttttccttcaaccctcatcaatcctatttctcaaatgacaatgctgatatgattttatattagggtaacctctctgagttctcatgaatcaggtaggtaacatcactctagacctcatttttgcccatctgtaagatggggatgacagtatccctccaaagagggttttgttaaaggtgaaagaaaatgcacagcaaggacttcgcagggaacagggattgggcggaggaagctgttagcaggtcagtaagtagctgcttttcttatataataattactattattaagttaattttgtccataatggtaaaaaatccatcacaagaagggctttgagagatctgtgttctgcctctagttaaccagtttacatagctatgatttcagaagtaagttgttcaatggacgaaacacacttggatcaaaaaaaacgtggtttcaattcagttgtagtaacaaaaacataagcgaaatcccctcataaaactagtcttttacaacatggtttttctttccctattaaagaaatatttgtttccaaaggaagaagatatgttgaaaaaatgaaatggctagaaacaatgactttaatctgcttattttttgttcgatcactgattttattctgtcatagtaatcaacccagaatgactgcatttctaaaattctgcagttttgaataagtaagatgtaaatgacagaagggtatatcattactacagggaacatgatcttatgtcctatttcatagagttaattattttcatttataacatcttagaaatgcatatttaattgtgagagattaaaaacgcccattgttctttcaaattgtttgaagtgttctttcattctgactcaattccattgaatatctacgagttgtcacatttttagtaagtaataactgtgtcaagctgtgctgacaaaatgtcccaacataactgttaataagcattgtcattttaagcatgaaacagtttagctaatgatttatctcttataatgcagcactcggggcagctgtatgatttgtctctttagcaagtcaagtaatttctttaacaaaatgttaagcacagatgggccataagctgtcagttaactattattgtgtctgcatctgcttgctttcaacgcactgttttatgtattcagtcagttacttagcggcagctccgtgaaaagctgaacctactctgattggcaaataaaatgttcatttgtctcttcttcctattgttttgttttggtaacacatgtcagcagctcaattacccagttcattaacagctcccaaaggacatgatggccagcccgcgataagagggcaattgtggcacatatggtcaataatggcctctctcttggcaattgtaaataaaagtcacttggcccttttcctttcacgagaactactgttttcctgttccccttcagtgtgcaaattacctttctgcgccccttgcaatccaatcccagtaaactagaatttagcttactgcttttagagacatggagccttactgtagatagcagccctggctcttaattttaattatgactgatttttaagctcttaggtggggagaaagttgttatcatgggagactattcttaaaatgctgttagctgattaattaattaatcagttttcctaattgaatagggacacattttcttgtgtactttcctctctttttctctttgaaatgctttggtggtagttaccatggcgttttaaaaagccgttaaaaacaattgcaaatagaaatcttttgcaggagactgtaggaaagggcgatgtcattcgtgttgtaaaaggaattcttgttacacacatatacacacataagaagccactgggctaatttgggtcagtgttagggttctcaagccaataacaaattcctccttcactttaagccttcgaaaggagttgcttaaacaggtacgggttggtgggtattttgtggctcctttaagcaaaatgttgcttgtatgagtggttgaaaaagacacaagcatggttttacataaacataccagtgaatacagctactaaaaataatcactagcagggctgcatgaatgaatgaaggagaaataagcctttcttgtttgctgctgttgttagaaaggaggacttttcgatgaccaatggtcaggtggtggcttgagacagaactccatccagagaaagtttcctcaaggaaatgtggatagaaatcctgcacacacctgaaactcaaaattctgagaagcttaggatgttggggggctttggggctgcgcagctcagcacttcagaggcagcttgccgtgccgccaacctctgcttgtcagcccttatcttaaacaaacacccaatagtccatgttgtgcattaaaaataactccggagcaacggagcacacggccaggccctcctgtactgcccccgtggccggccatattcataaccaatctgtactctcctcccagggcagcaggcactcggggagttgttgagtgtcagggtttatttgtgctattttgattagccccaacctggcaggagcttattttccttctaatgacctcgtgctgtgagacggcagcttccgagggaagggcttgggtcagaagggaggggaatagcgttacttttctccagccaaaaaataggggactgctgggcaggaacaagagtaggtaaatggctggagggtcttaattagatttagtgttcttgaaagaacctttgctcaagaaagctcagcatatccttcccaaaaattctattttttttttttttgcacttgctaaagagtcttttgctggcacatttcggggagaaatcatagagggaataaaaacaaaatgagacccctttacctacccctcacccccaccaccaaatagaccattgaacaggttgtaaaccatccctcccagtttatcaactcacaattgtttatcaaaataacaattactcggaccctagttctgggttaagaattccggaaagttcaatgtatggcttgatagttacacaatgtacagttctagctacacgttaaaattttattttaaatctctgttttttttccacctgcatatctgttttcttttctcaacatatatacaattttaaaataaattaaaaataacatcgctgattacttcttagcttgtgaattaatgtggaagagaagcttccaggtgctgaagtctctcaactgacttggattaacccctactgtgtatccatttcaacctcccccctccttctctctctgaaaaaaaaacccaccccaacctcccctttctcatccactccagctttctttgtgtctcctgcgccctgccaggcaggtgtcagaaccctgaatgagggtaaatgccctgctgatggattccacagatggagcgtggaaatcggtagaataggcctcagccacaggccatttcttgggatccaacaaaagcctccaaataagtcaacaaaaatcccaaagatcacaaagggaaaatgtcatttgtcatttactctgggtctgcaaaggaatatcagtcttgcttcactcctcctgactttcacccgagtaaacacgagagaggtcattcacatctttctcagcgtaaaagggctacttcagatcagaaaacagttagttgtcccattgtacccttcacgttgaatggcaaaactcacaagcgcaggagaccttctgcaattagccaagtaggttcatcaaacttcaagttgacctgttaaagaccttctggaatatacttgtgaaatacccttaagtgatcagactcgcagtataaaaaggcttcatggagctctcaggaaggattcttatttttatcttgttcttttttcagtgaaacacagctgggagtaaaagtgctcacaaatctagctcagaaagattaaaactgacgaaaagaccatcgggtttggtatgaggccatcttatagtaaataaattatgactaggaaattcagcctccagagatccctccacctcctcccatgtctgtaaatcacattgtattatatctagggcaaacatagaatttaaatggttgtcatgttttgattctttaattattcaaatgaaacgtcttgctgagaagaaagacaatgtacaaaattcatgcttgtgaattattttgtttctccattttttgcctgtctcccatctctgaattatatttgtctgaacaccaataattacagaattccacatgactaaatccctataaaattgaggcaagatttcatgtataatagtgttaactaggatgaaatatttcccgaggctacagaggaggtcacaaggggctaacggacaaagacatactctctaattctgtaattccttctttaattaaacttcatggttagcccgctggtggtaatacttttgccttctcctcccagtttgatttgtctctgaaggaagagtttgtaatcctgtgggggtatgacagttgccctgtgcttgatcctttctttctttttactgacaatgtccattttcccaagtgtaatcttgggagttaatgtgagatgattaggataactaacaatttggctcctgtatctaaaattagcttgagatcgaactttcttataaagcacagagttgaaatacttcggtgagaggtgatgctttcagtgatcacactggagtttctgctgaataacctgagaatatcctgatatgtttccagttattccttcctgcacttttgcttcagaagaccattttagctcttgttatatttttattacattcattgtaatacaaaataccaaaattaaaactttaataaagatataaaatgaataatcagttcaccagcttatgattattggcaggttccagactgaccctagatatcaatggtctgtgatggttcttagtaaagactgcaaatggtcagatgaactactttgatttcttaaatccatttaatatcttggcaaagttgatttatttcttagtgccttattgttgtttaaaaactataccttggaaacatacaaagatttaaataagtatttgttgaattgaatccactggaaaatcgtttggattggtgtataatattgatccaactctagtagttctgtagatttcattttatgcagggcagtttttcaaaatttgggataaatggtagcaatagtggtgattagctaagtgattgatatttgaatttctgtttttgttcatttctgttattcctcttcaaaagaactgtgtgtgtgtgtgtgtgtgtgtgtgtgtgtgtgcatgtgataaaagactcaacactcatttaagatactctaagctagaagcaagccagcaagcatgtcctctgaagtcccatagatctgggtcaaattctagcttccttagctgtatgaactgaacaacctcttggagtctcagtttcctttttctgtacagtgggataagtatctaattcctaggattgctgtgaagttaggggggaagggagagaaatcctcatcctcctggaaagcgttgctctagggtcattggtgacattgagttaaactaatgggtaagccagataatggattgtaaaggggttttaataatagattcaaaaatttctaaatctgatagcaatatagattgggataaaatctacatctttttgcaatttaaagcaatgaaatttccatttagaatgctgtgcatgatgtattgatatggattttcttatgagatctattctggaatttcaaatttgggaagagtatctctaataatgaaggaaattttctttgtgaaggcatctgtaaaatatgattgagcaacttaagtgtaatttagaatcttcccttaatattaaagttgtacagtagtaatagtccaaagagtttatatttaatctaattgttgtatcctggcaatttattaactcatttacacaactgtcctgctaacacatttgtggtttccaaatcatagcattagatattctatagagaaaaaagatataatttctttctattaagcttcctgaaagaaagccttgtttttactttccgtgtaatatttagaattagattctttgtatctcctatccaattgattctagtagcttaagtaaaactgagtatgtaaaatagatgaaatccaaaaaaatggccctcctatgtgctcttaaaatgggatttaagttttagttttgctcttggtaaaaactggatgattctgccaggtggtgtgagtctgtagtcccagctatttgggaggctggggtgggaagattgcttgagcccaggagtttaagaccagcctgggcaacaaagcaagaccctgtctctaaaacaaacaaacaaacaaaaatgaaatgattcaaattggggtgatcattgtgaatcaagtgctgtacaaataaattttatttctattgaatgatataagaaatagtagtatttccatgtttagaaatagctagtttttcctagccggcagattaatcttgggttgctgactttacatattttaaagcccacatccctttggggtttacagatggggaaaagttagaattatcttgtaagattgtggcttcatattgccaaaaattatctggtttctcaaataagtttccagccgaaaaatcaggcaaatcatttcctcaacatcttctgaaattatgctatatggtggttttcccagttagatgcaacctttccattgcttttgaataaacagtctagaagtaagagtagtgatttgtaagcttgttaaagagagttttatttttggtggtaacggctgtcctattgaactcttaaattctgagactttttttttcttttaaagaatcaccaggccctgctttcatggcctatatttatactcaaagtcaggatcaagggagcttttgcccttctcctccactggaagtttctgtcctccctgaactcaccttaggatacctgcattcctgtttgacaggtgtactgtcccaaattctgaggcttttcattactagctatgctagttttcatctttaaaaaagcccacaatcctctgaaaaaattggtaatcattcttccaaacaatgcaggtatataaatacctgctaaacattcaacatgattgttcaggcctcacagacttccaaagcccatctgaatagatgttgggagatgtcataagaggagaatttccattttaagaataaagatgtaaaacagtggcaaataaatcagtgttggagcaaatctgaaatttgccccacacttggcattcattcaacgtgtccttattgagtgcctactgtgttctaagggttccagcagtgaacaaggcagagaagggctttgagctcacccagtttatattctggggaatgttgatttttaaggtgaaacaccatggtcttgaccctcaggattaattctcgctggtgcttgtaaatctaaccattctttttcttcagaaaccagagacgattttgattaattgatctgacagtgcatggcacatcatatttacttgaaagaatttaataaccccagagactcccaaaggaaacatgaaaatttccacatactattatcctaatgggatcatagtaagagaatgtacaagcaaagatttagggttctcttgggcagaggaagtttttggtcagtctttaaatgctattgagtgtttcacctgaattcactttggaaagaaaggttagaaactggaagcactgaaggaaaatattttatggaaatttgtcttcttaggggaatacgtaatttgtttcttagggagcacattgttcacaatttaaaaatatacatgtgggagtgactttcagttaattgtggcagatgtattttacagagttgaaaattttgagagtgacaagaattaatctagaatattctatagaggtgggcagtgttatctggggtcggtagaatcagcatcaatcacctgggaatgtgttagacatgcaaactcttggagcccacctcagatctactgaattgaaaccatggaaggggatccatcagtctatgttttaccaagccctccaggtcatcctaatgctccaaaagcttatgaaacactgttctatgactcggcacaaattattgctcatttagtttagcttacatttatcaatcatacatgtatataagttgcattgggagcttttggagtttataatgcaatgcatagcgtattttttagcatgttaattgtcctttaaaatattgccatagctagagaaagtctagttttctttctttaagttagtagtaaaatatcctaacgtaagatttatgttaaatgaaataattttatattaaattagataattgaaaaatcaaaaataatatgtaatacttctcttttgttttatgcacatgtatttgttttcaggtatatttaaaaaaattatcacttgcattattaatttactctattgcctcttagtttcataatatttagatgtgaataaagtatggaagtagtaaaatgttagaaaactgaaaatcacatttatgggttcattttggatgtgtaccatttggggcagtttaaaatttctactgaaatagaatgaaattttagatttctgtagggcagagttaagttggagtttaagataaaagagaattagaagtaaaggacttacacatattcacattgcttctagcaccaccttcatttccccaggtcctatcagcctgagggtgcaaatgagttagtgtgacattgacattaataatctacaattttctggcttactgttgcatttgctgacagtaacctcggccccttctttacaggatcccttagttatttggggaattttcagagcacatttggatgtgttcaagagccaggctgctctggttccccctctaggctcagggtctatggcctgataaccctttgatagatctttgcccactaccccagtatctggggtcccgggagagggctgctcttcctgcctgtagccctggtctgatgcattctccctcacactgcagaaccctctatagccagcgttgctctattactgtaagggttcactttgctatgggatccctaatgcattcctagcagaaacagggaaaatgcctgctccacccctgccctcatcaaattctggcctggaaatggaaccacttgtgcccaggttttgctagttgcagccacagattcagaccctgttcttacaggagtactaaccattttgtatcattaacgtaatttgtatcaaatttcccacttcccgcttctcttgcccctgtacctgcccactcaattttgaaattcccttccacatgtgagtacaggcaaatacacacaagttttgtgtgtgttaggccaccacacagtggcttcagggacatttttgtcttatgcagttgctcagggccacacactcagaaggccctgggattgggttaatgatctgttgttgccttcttgaaactcataatatttttttacaaaagggatcatactttttttttttttttttttttttttttttgcattggctttcttaaataaagcagctgtcctggacagatgcccactcagcagagacccagactctagttagggacagttcacaagacaatgcctgcctgcttcttctcaggtcagttctagagatttacattttaatagtacatacattttctttaaagcatttccccatatctggtgatgagatactgatttaaatataattttttataagagcagtagtctataaatatataggaatctgggaatagttaactgttactcgcttcttaggtactaagtcaagtttggaatatttttaaaaatcacatttaacagatttcataatgtaaatgttggtgaaaatttatcagaaacaaaactcaatgtgatccattcattagacacgaaggaagcacccattaagtagtaagcatagggccatacaaatggaataaggcctgtccctgttttctaagagctcataattggcctagaatgacagatgctatgagcaattatttctgcctagggggcagaaagatagagtaggagaagagattaaatattatttaatgatgcaggactgcatgggggcggggtgcttggtgtccatggaagacattgggaatgcactgtagaccaggatttgaattattacggattggttagacttgttttttgatccacatttattttactttaggtatagggatcactgtaatggtgtcttgcagtcggagagagaacttggattcaatctcagttttatttttttgattcacattttatgatgttttgttcttctgtgcttttagcctcagcaccccaatcagatgaaggctctgatattgactctgaaccagatttaccactaaagaggaaacagcgcagaagccgaaccaccttcacagcagaacagctggaggaactggagcgtgcttttgagagaactcattaccctgacatttatactagggaggaactggcccagagggcgaagctcaccgaggcccgagtacaggtactgttgcccaaacctccgtgtcctacttcagtccagacaggaaacaaacaagcatcttctcatctaaaacatatgtcaatcccccccaaaaatgtattaggaatggccctttactagggatgcatattgttaggactttgattatttactgacagaatacaactatatcatttacgacacacagaagtccaccacttcatgtgactaactcaacttttcaggaatccttattgtacaccagcactatatggactttgggggtgatacacaagtaagagcaaataaattttgagtggttactctgtcccagccactattttaagtgcttcacatgaattaacccattgaatcattattaaaatcctaggtgggtaccatgattgctactctccatttacaaataaggaaactgagacttggactatataagtaactacccaaggtggcatagctgcaaagtgagtctagagataattggatcccatacgcttcatctctgtgacctttcaattatgaaaatgtgcaaaggtgcataacatgaaattccttcatttaacgattttataattaagaagcatttcaagaaattatattacttaaagaacatgttgaattatcttttgaactcttagaggtgctctgaaccttctggaaaggctacttagatgtaatatgtttctatagagtatagaataatgttttcatcattaatgaagaactacttcctggagctagtaaaacagtgtttgaaagatggcagatatcgtagggtatcctcgaactcctcaccaccctagaagttaagtcaccttgtctgcaaatattgtgtgttatttccagattcttaatttgcaggctggggactcagcagtggactagtcagttgacatggtccctagattgatcaacacgttcatagatgcagctaattaactctcctattacagaattttacagaaatagcctcttccaggctgcagagctcagtcagagagattgttttcttcaaacttccatatgatcatcatagtgctaggaaagtcaaggaatgctaagatcaattaagacagttctctgaaggagttgcaatctaagaaaggtaaaaaaataaacatacaaataatttaaaaataacacagacatgataagtgcagaaagagaaaaagtgcaatgggagttgagaagaggaaaggatgagatttttttttttttttttttttgaggtggagtctcactctgtcacccaggctggagtgcagtggtacaacctcagctcactgcaacctctgcctcctgggttcaagcgattctcctgactcagtctcccaagtagctgggattacaggtgcttgccaccaggcccggctcatttttgtatttttagtagagatggggtttcaccatgttggtcaggctggtctcgaactcctgacctcgtgatctggccgccttggcctcccaaagtgctgggattacaggtatgagccaccatgcccaacctttttttaaaaaattatactttaagttctgggatatatgtgcagaaggggcaggtttgttacataggtataacacgtgccatggtggtttgctgcacccatcaacccgtcatctacattaggtatttctcctaatgctatccctcccctagccccccaccccccaacaggccctggtgtgtgattttcccctccctgtgtccatgtgttctcattgttcaactctcactcatgagtgagaacatgcagtgtttggttttctgttcctgtgttagtttactgagaatgatggtttccaggttcatccatgtccctgcaaaggacatgaactcaagggatgagatcttgaaggaatgaagagaggtacatgaagaaggcagatttaattttttttttttttgagacagggtctcattctgtagcccaggttggagtacagtggtacaatcacagctcactgaagcctacacctcctgagctcaggtgatcctcccacctcagcctcccagatagttggggctacaggtgcatgccactatgcctggataattttttgaagagatgggattttgccatgttgcccaggctcttcttgaactcccaggtgcaagcgatccacttgccttggcttcccaaagtgctgggattataggcatgagccattgtgctgggcccagagggcagatttaagatgaactttccgggctagatagatattcactggaccaggtgcataaggagagtatattagtaatagggaattatatgagcagaggcacagagaggtagaagtggtgggctacacgtaagataacctttctttttcactctagtcatattgggagaatagttagtttgattagaatgtaaggagtggtagggtggtggaagaaatagggtttggtaggtaggctgaggatatcctatggaggtcttgggtttcaggccagtgagctcacatttgatgtgacagggagtgggggctatggcatgagataggtagtggcagtgggaatggcaaggaagagatggtggtgaaggtattcagaggtagaatggacaaccgattgtgtaatctagaagtggggaggaaggtgagtgaaaggaagagttgtagatagaccaaggttcacagagctggtgttttaaagttgggaaacctattatcattgggaaacagagtgtttctccccaccacacagtgtagaaataacctttattaactaagtcataatatttcaatagaaaaatattttaatacagtattgatatagtaatattatataatactatataaatattatattaacataacattaatattactatatcaatgttatgatattaacatgcatattaatataacagtgcagagaaaaaatctgtatcacaatcaaaagggcagacaaattaaatcatataatagtatattatatataacaatgttataaataatatgtttcaaatctactttgcttttattatagttctgcaattacctgcaaatgttatgtgaggtccaatcatgcctcttttgagtggccactatattccaggatttggtacctgtcctctgtaactggccaagcccacctactagatctgcttttttgtttgtttgtttgtttgttttttgagacagagtctcactttgttgcccagcctgtagtacagtggcttaatcatggctcactgtgtagcctcgatcttccaagctcaagtgattcttccacctcagcttccagagtagctgggtctacagatgtgtgccaccatgtctggctaattatttttctatttttttgtagagctggggtcttgctatgttgctcaggttggtcttgagctcctggactcaagtgatcctccctcctcagcgtctcaaagtgttgagattacaggtgtgagccactggcactagatctatttttaaaataggccgagtatcagctctgaactcaatgtgagtaaggaaaaataaacatttattgtaaatagatcagacaaggagtgtgatggaaaactgaggagtgttcggtgttgttctctttcattcctgcctttgtcaaaactaaggatggagacagaatatatttcaaacccatgtagcttgtacagcacccagcattctcatctggctcaatgaatgtcaaaggataataataatggcccattaactttcagaggacatgggatcaaaccaataaacagtagttcatacttttccatatagtgacctcctcttcgaagcagggccttcattaacgtaacagctgtcttaatgtggctttaacccggtgactcttgacattccttatggcttctttagttcccttgagacacatcatggctggcaccacggctgtgatctatagcctaacaaattccctagaacacccagcatatggatcttttacttaacccagcaggaaaaagaagggagtagttaatcactgattaaaatgccagaagaaaatcctttagtttttagaggatctgggaaagcagtagccaagtcaactcagtttgagtgatagccagaaagtgtgagttagtttaatttggggcacctgggaaaaccaaacacgaaacaccccccaaaccccaaatcatgtctacatttcattttttttctcctgaggaaaaatatttctacactcttctaaatagaaatgggactaaagctataataactttagcctctgtcagtgttttatataaattcatttaggctgtagctgtgttgagtttatcataaccaaatctgagtacacaatgtaagaactgttgtatactaacgactatttgcctagtaataataacactacaaggttttttttttttttaaaaaagatgatttgcctaattcatctgtaatgagggtagctgttattaatatcatgcaaataatgacaaacattcaagttttgtggggaggaattacttgcaaatattaattaattaattattttttgagacagggtctcactctgttgcctgagctggagtgcactggagtacagtggtgcgatctctgctcactgcaacctctgcctcctgggctcagatgatcctcccgcctcagtctcctgggtagccgagactacaggcttgtgccaccacacccagctaatttttgtattgtagagatgcggtttcaccatgttgccaaggctggtctcaaactcctggaatcaagtaatcctcctattttttggcctcccaaagtgctgagattacaggtgtaagccactatgtctggcccaaatatttatgatgtgcaaaagttttagtaaatattccatctaagaatcccatgaagtaggcaagtaacatcctgttttaccacgaagacaatggaagacagaaaaacaagttactaggggaaatagaatttaactaggagtcagatgatatgggtttcgttcccagttgacaaatgtgttttgttgagcaagttacttaatcttgctggaatccttttggacttcaggtttttaatttttttaatttaaaaaaatatggggttggttagatcacatgatctcagctggggttcatgccccaccaggataatcatgggtggacttcaggagatctgggagatttgagatttgtacacaaaattttgctcctttgcttgtgtatgtgtatatacaactgttaactagagaaagggcctctggctttcattatgtgctcaaatacctttctcccatgcccaaattaaaaactagtagaacgcatgatttctcaggacccttatagcatcagtaatttaggattcccaaaaaataacaatggtgattcccaagggtcctgagaaatcatgcattttgggaatgacccaaatgcataatttctcaggacccttgggaatgagaaagggaatgagaatatggcagaatccttatagcatcagtaatttggaattcctaaaaaagcaccatgatgatttgaagccgtctaactgatctgtatagttcagaagttcagataggtatagaatatcctaagctccgtaatgaagcaaacatatgttcatcctgaagttctctgcaggagtttgcttttgggaggtatcaagatgcagttgagtgtgcttttgtgtgtgtccatggtcttttcacatgcatgggagcatggccttcctcctgttcaatcttgcccatcctgtttccaacctgctctccaaatggtggccaaagttggatagcagcagtgattggaaggctgggagaacctttcatagaaagagaaaggaggtgagagtgaaggagaaggtccagggaaatgagcagcttgccctgaatttccctacttggaaagtactgtacttggcatgtcagcattcgacatcctgagtctagtatttaaccaaacgttttacaatcttgttgcgaattctctttctaaggattaactattatgttctctccccatttttcaaattgcatttgaagtaatccgtcttgaataatgtaggctgaattgcctttgagaacaccaccaaaaatgtgaaccagtaatttattgatgggcaaaattaggctgacaccaagggacaattagcactaatccatgaaacttggaagcaaatttgacctaagcctccattcaagtcaaaccggctttcaattatttgaggtgttttctgggcactttcctgtttactcacagacacaaaaggctttggctggacaccacagagtgaaggaagcaaaacagagcttcaattcttggttttctcagatagaagtgtcagtgtgagactttctatttaatagctagcatttactgaacatttaatatctccttggtattcttttagaagcttagattgcattgcatttttaatagtcacaacaatcttgtgaagtagtttttatattccccgtttagcacatgggaaaacagagacccccagatattaagcaaattgttcatggtcacagaagtattaatataaatgaggagctgagattcaacttttgcctggtctgtattgcacacatgtgaataagatgtattgttgtatctttactgtagaaagtactagtttccccgccacccgccaacttgtaatgttgagagtctgaacaaactggtttgcttactcataaaaagtatgaaaatttcttttctaattattatctttttttcctagttatcatgatgttatggggctctttcaaccaatttaaattttgtttcaaaaaatcattggacattatactactagagaaatgcatgtaaagatcatttttcaaagacatgaaatatggctttatggaaggactcagtagagagacatacaagttgggaagtacaggcggcagataaaaatgaaccgggctgcagtttatcaaatgaaataacaacttgctttgagggagacttttgatgtaatattatacatgcaatgatagacaattaactgtgtctaatagtatagtaggttactgacaaatttgtgcctcctgcccccacttccttaacatgccaagtgtgatgcggaaggccaggtaatcttgtgtggggatagtaaaattacattgaattgtagatcatataatttcatttaaaggtgtatagccaactttgtaaatcttgttctttccaccctactggcaaagacattgggtggtaaatttctgttctctcctagaacatcagtcataggccagtttgcctctgttgctactgctattcttttcaaaacaaggggaaatttctagaaagtgtaactactaagttataaatatgtatattttagatgaatttattcagtgttatacactcacacatgccattctgcagattattcattgattgtatgttaggaattagtgatacaatattgaaagagttatctaagacttaggagtatcaagaaaatttcagttaaatgtgggctgataacagcctcctaggatcactacgcttggttcgttcaggtattgaaagtaaaggtcatttctagggtactctttttagtctactaaaaatagaaaatttgtctgttttgagtttcaaaacataaagaaggcaaagaccagttcttaatttgcaaagttagtgtgtttttcctttaatacttcttttggcaaattcagctggttctaggaaatgcagaaggctggcaatggtaagatgataaaaaatcaggttaaatgaccagagacaggcaggccagtcctcactaagccctggttctcttaggaatagccctctggatttatttagcctaaatttaaacaacatttaaattccttcctttgggaatctcttgaacctcttgctgaaggtttgtttttcagtaaagatttgcttcacaacaatttctcttcattttttattgtggatataatagatactgtataataaatataaggactttttaatccaactcctggtgagtttactcaatgtctttgttacctatttatatcattttagaaaatatgaaaacaaacccccaaacccttatactcttactctgtttggattctgtcttttgaaggtatttgtagaaactcatgatgtttcttctttattatctcagcaaagacatttttgtttttaaaaattgggttatggtggagttagaatgaaccttgagtcaatagtaacttgagattgatggagagatcaggcttcaccactcctgggtttacttatctaaaggttacagaaggcaggtggcacagagagattgccaacaaatctgacaaaaaccgaagcgtacctttctgagttcttcataaagggtttcaccagtggaactgagcatagtaaatcttcatgagtgaagttacatcaaaacttttggaagtccagttctcctcccagcaatataaagctggagatgcactgtacatcgctggtctagatagttgcagaggactacctgatctgagccgggagtacctccttagtcttgacgtattataatataaactacaaccacagtgtgtgttatggtacagtgcactcaggcatgaacatgaccctaatttcccaccttcagcctccccaagctaacacagtttgttcccagaactttcttgaaaatgattttcttaccctgatgcctttgggagccgtggtaacaggcactcagaccggggcagtgagaaagcacagttaatgcagacctgaaattaagtgctgttcatggttctattaccccaggtggcaatttattaagttaagtaaaactctaattcaattatgtatcaacatgggaaaatattaacttacctcgttttcctgttggaaacttaaggagtattaaatgttgatgttttgaggaagttcaaacagctttccttaccagtatcttgcaacaatggcgagagaagacaaaactcttttcagacaaatgcttgggtgagtaccaaaagtttgagcaaatccctcggcaaaggatttattaaattgagcttcttctccagaaaaatcttttcctccgctcttaaatgatctgactttaagaattacaattaagttgcaaaattgttaacattgctctgtaaggaaatcaattctcatcttctcttaagctggcctcctgtaacaagctgcatctgcctgccctgtaggacaggatggatgtcacttccatctcaagcgatcgctcgtcgaaattagaatcaaattttaaaatgagctgaaactttttgcttccactttagagttttcctgattctctgtgcttccaaatgtgaagtttctacctctagcgagcaattattttggtctccttgactgctctgtgaatcccatgaggacaaggcatcaaactaccagagtgcagagatcctacttgattccctttatatccttccaaccccaaacacagtgctttcctccatattaagtttcaatgggtggctcacgcctgtaatcccagcactttgggaggtcgaggcgggtggatcacctgagcttaggagttcaagacccacatggtgaaaccccgtctctactaagaatacaaaaattagctgggcatggtggcgggtgcctgtaatcatagctactggggaggctgaggcaagagaatcccttgaacctgggaggcggaggttgggttgaactgagatcccgccattgcactccagactgggcgacagagcaagactgtctcaaaaaaaaaaaaaaaagtttcaatgaacttttgatgtaggaattagaatatctttagttggtagaaatcctctctcattttaggggaaacatcatgtgtgctccgtggaaaaatcaccccaagttctacatttaaactttgcagatgtaagagttgggcaggagcacaggacccatgaaaggccttatatcacaatttctcaatagtttagatattcagttacatttcttgctgccatgactgccctttctctccattgactcatacaaaatacttgggctttgaattatttgagggcattttattatattgtatcaggcttttctgaatgtacctggttagcatagtgcttgacacagcgtgttctaggagcttaaagctgttgttgaaataaataagacacaaatgaattattttagataaaaaaaggctttcatttcttgaaacacttacctctttggcatttatttccaccgagatcagtgcaatgtttcatattttggaagagatgaaaaaagggctccacttatcctctgttcaatttatatgaccatccagaagctatacccctagtgaccacagaaatacagagacagactaataagaatataaaatacaaggcttggagtaaaaggcaaggccacatttaggacatgcgtcatgcaggggtcacagaggctcatgtatcctccccagaaggctgtctacacgtaggtgggtggatgttgagggtagggaggggagttcctgttgttcctactcctgctcagtgattcctgcccatggtcctcataaggttcatgggggctgttgttgcaagatcatggtgggtccctgaagcccctctactgacctttgacactaaactcttcttttactcctgacaattcgcccaaacaacacagaaggcagagaactcttgcatctatttgccctttcagtaagaagcctctaatctgttttagcataaaaaattcattaagaatgtactattatttcatcagtgaaatccttaaattttaaattaaatccataggtctggtttagcaaccgccgtgcaagatggaggaagcaagctggggccaatcaactgatggctttcaaccatctcattcccggggggttccctcccactgccatgccgaccttgccaacgtaccagctgtcggagacctcttaccagcccacatctattccacaaggtaccgaggaagagtcaaggagattagaaagtaacttccaggcgatttctctggtggatattttatacaagtgaatccttctgcagtactgacaccatgttgttaattgtaatacatcaggttgtcctgaacgtacctatcacatttcagaaacatagtttgttctatgatgtatcagaatatctctagataaactgtgctgtaatataattcaattgcagtattttaaaacaaattaaccttcccaaataaccatgggatttgcttttcttttgttaaaattttacctctacgttttactccagtttgcaactaactggaattcaatgatgcttactaactgtaggaataatagagggaaggtaagctttgacaaagtcattatttgttagcacacagaggtgaatgggataatgttaaattgtaagatccgattattttggattatgaaagaacattccaggcatttgaaactatattattacacaaatatttaggtgctttaaaagtatatttgataagaaatttgagacttgcagtccttatattggttaattctcatattgatgaataacattcactaccaaaatatgcttgttagcattgctaatatgatttctgcattagtattctgggtgagcctgccgtgagagtatatatgttacttacaagtatgtgcagagataggtgtgactgtatctgttatgggtgattctacacctgcaggttaagaaacgcagtttgaagtgaacatttgatttgatcaatagatgctcctgatggcctggtggctgatgaacttttgcactgaactttctctgctggcctaaaagaaaacatgatggttgacaatctttttcatttcagctgtgtcagatcccagcagcaccgttcacagacctcaaccgcttcctccaagcactgtacaccaaagcacgattccttccaacccagacagcagctctgcctactgcctccccagcaccaggcatggattttccagctatacagacagctttgtgcctccgtcggggccctccaaccccatgaaccccaccattggcaatggcctctcacctcaggtcagtcccgtgtttctagacagacgatttgctgtataccagaaccaaatattcaattccctgaggcagtagtgtaatgaattgccaaatttaaaccataatgtattctttatagaagccacatgatttcagttttctggtttcctttctctccacccttcctactggcttcatcaaaagttgtagcttagacttaaaattcaagtgatttttgatataatcttggagactttgtgttcatatttagctgtgaaggtgtttgccatgttttgtcttctccatcctagttctgggctttggttaagaagcttgcaaacagtggcaggttttttgttttgtttttttgttttaaattgtatttaaaattgataaggtttcaatcaattgataaggttttaaattgatgaggtttcaatcaaaagcacctcataagaaaacactaaagctttgacaaaacaatcagagaggaagcaaacaagtcctgtggagagagacccagctgatgactacgaactctggaataaacgagttataaatgcacaaattaggggaattactgctctttgggactatataaatatttgaatgttgtaattgtttttctaatttgcattggactatgagcttttcttaggagatcacattaataaattgccttgataattgcatgtgagagggttggttaaatttcctacatgtggcatctgtctgaggttgacattattagcagttgtttaaatacagatcccttgattttattagagagtgcttggcccaggtggcaaggatagctgcccactaaatttggagaaatgtcacaaggggttgcaatctataattgcaatcgagaatctcttcagagagtttgaacagctttatctgttctcaaccccctttttcctcttggtggttagaaaaacagagagaagctcagaatgacacaaatgaaaagtgaaaagacaattatactcaattacacactaatcactgactatcaccgctgcctaagcaccaagagggcattctaataggcagaaaatgagattttaatggcacaaagggtggccaaaataacgactcgtatatctttgcctcttcgttttcttcaacttgtggtgtgtgtcttgggagtggaattcctgggctctgcaagacagtgataactgtgagcagctgaaaagttcaaagccggaggagttgaaaagaatggatagcaaaggcaatgaaataaacatttccgcctaaaggcaaaagttcataaatccttttttgtaacagtaaatgtaattaagtttcatagattcctatagcacatcctgggataaaaaaaaaattatgaggtggctttaaacctcagctgaaaaataacaacatgaaaacaatgaaagtgcttcctacaggactttaatacattttatttccaagtactggcatttgtgaatgtgatttctgcatgaaaatcatggacttatattgatagagtcatccttaaaatacccagattcatggcatatgagcttcttccacaacttagaagtaacatcagaagtacttatctccgcgattttttaagatttgtagttttgggggctgtagaaaagcttttcatgaacatgatttggttgaaagttttaataaaagtaaactcctgccctagctgcttctgcaaggtgagatcccagattccattggcatttcttagtaccttattttattcaatagcaataaaactaataagaacctgtattctataagtgaaactggtactttcttgtataaatgtattatcttgtatgttatgatgtgtattcttttgtattatataagtatcacataagtagaattgctagaatgtgatctcctaactattaatccttgacttcaagaagcctggctatgattctggagttgatggtagagcaaaatcattctaatactaagcaacggaaaattccataggcatttttcctgtatttctttactatatcttacatattatggtaattctttattacattgcaatatgcagggtattttgcatttctgccatacatttccacctcaaaccaccactaggaatttatgttctcttggtttttgtagcaaccccactgagttagaaaagagacaaataatatgaaattcctccttatttcctcaggcaaagttaaagagcaaaggacaatgagcaaatcagtatcttgccaaacatatttatgcaacagtggagtaggaaaattggattcaaacttagatttctgtaaactttgggctatatcacttctctgtaatgacactgtttaaacaagaggtgcctacactacttttgcttctctggctttcttaaaaatattttaaagaaaaatgtgaagcaacgagttcatgtctaacaccctggtttacttgttaactaaagaagagactagagaaaggcttgtgacctataagtcactgcttatcatagagtgattatgaatatattggatcatataacacggacagtgttatgctgagaataactaatagcgttatgattaccatttctccttttcctcactacttactcttctacttcctctacctctgtctggttatctaatatgcagaaaaaccaactgaggcccaaaatgattgtcaccttctgccagccaaaggattgatagggagggaattaagactagaatctaggattcctggttcctggtctaggatcttgtccattatagtccagagttgaatgaagagaaaacaggtttcataaaaaaacagatgcaggaggttttagtcatattataaaataatttagtagagactagttttttaaaacttttctgttcaggtcaatttatgctctttttgctaagtttaatttccattaatcttctatcttctcctcatattaaaagcattggatgttcattgtagataaataaaaaaaatttgcttaaaaagtgtctataaagtagaaaaaacaacccccaaggcaactaccatgagtatctttgcatattgccttctagctttttaggttcttatgcctcctttagaaacataattgagaaagtagaaagtagtgcatacaactttgtatcttgccttttctctgtctttacgtgtcatcataggccttctgccatctgtcaatttacaccgaattggttatagttttttgagtcactgtgatcagttcactgtagatctctctggtggagctatttgacatgttaaaaatatttctgcattttattcgactttttccctagagccattgaaattgatgtattgtttgccatccacacttggaaattgtgagctagagtatgtgtgaatgattgtagagtgggctttctagtttctcatcaaggaattaatagacactataaggatagccaaagcatctctctctctctctctgtgtgtgtgtgtgtgtgtgtttgtgtatgtgtacaatagttggtttttgttttgtgtctctaatgtatcttttcccttgagcaaaggctgggaattacagccatttgccaaatggcgcatcatagatgccctcagtcctttcctcagagaaggtctcagcttcatgaggggctggtgtgaagcagtgtctcagggaggtcacacctgtccagatggtcagagcttggcaatggactgatctgtatttgtgacagcctaaatctcagaataccaacagcaacctttagaaactctgatgtcgttcctcctcaagttgctgaaagggtctgtgcattttttaatcattggcaagtttttcttgttctgagggaatcagcaacaatatctggggaatattttcattttgcttattggaaaactgaggccaaggcaacacaatcatttaattgatggagtgagctagtggcagggttaagagccaactctatgtcttgtctagttcttactagttcttctatgaacacaaattacacattttagtggctggtcagcaccagaggaagcataatgtcctaagaaatttcccaagggctgccccagtgatattcgactgaattttcttgcagccatggttgaatggcttcacaaatggtgggcttggcttttcattctatcaaaggctgcatgtgtcagggaatttaaggcgagattctcagtgatgcgtgagagggtggagacaggctaatgacctcaaaattttccaccatctctggatagctgtttgaactgcataacctttttggagatggggcttataatgaatgacaaaatacgctctgggaagggaagcatttaactcactgcaacacgggctgtcttctgtagtaccatccttctgaaagtttctgttctgttgatgtgaggaaaatatagtgcatggggtaatacagaccatttatttcccctccatccccagagagtacattaccagcaccttcctacacatgcaggaggaaaaaggaatgctgccttggaatatggagtaccgaggaagtactaccatatgctcaagatgtgaggctaattaacatttggcccatgttcttctaattaacttttctttgcaagaaatactaccctgactgttcccctacccccaagacacacatagccaaacccccaaaacaagaccaattaaattaacaaacttttatcatttcatgcctcaccccccacccgacttctacaaactccacagttctttggtaacagtttctaaagatttcctgagtgaaatacagtatcagtgggttacactgtttataggaatcttttctattgttttgtagtatacaaaatgggccaacttggctgcatttagggttcatcaaccattgcaaatgattcttcaaatgttttgggtttggtaaaacctaaaacacatttttgccaagcacttttcctccttaatttttcaaactgtgtattttaaggaaaatttgatccatatggttttgattcatttactcttatatcactgacatttttttccctatgaagccgtttgatatccaagaagctttctgagcctttcctacattcattttaagcattttcctccctgaaaagaggaagttctgtttgcaacctcagagcccataaattttgagttcctctcatttcagcaatacttacaaatacatttggtataaatctggattattatgaacacattttatgtttagaacagatgggcagattttagtttctggtttatgagtgaaaccaatgacaaaataagaaaataggcttaaattacaaaaaaaaagttttgttttagagaacctttaactgttattaataaatccccatggtaagaactatgctgtgaggccttgtttcaaattttgtccaggtcttgggtaagatgtaattgaataaccagtacacctgtcctatttcatggataatctactgaggaaagaaaaaattctcataaagatttgtgtactgggcttgaaaaagcctgaatgtttgcccaccactcagcaacactcaggaacaaagaagaggtctgcagatctcatcaagtttatccaccattcatctagtaagttcggctgaatcatcacagacttgtgttgatgagataccatctctgaaatagacccagaaagagcagatagctctttacactaataagactgtggttaatggcataaaatgccaggatcgactttttgttcttattcacattttacaaaagcaaacctttaactctaccacccatccagttgcttttaaagaataatattaaaattgagattattagtgtgtaatgtatgtaaattgcatatttggtgtcagctacgcctattaggaagcttcttcgtttcatgcatatatgtattagactatcgtggttccatttcaaattagatttcaattgctcagcacagttccttttgacaaacatttgttaatcctgaaacttattaggaagaagcatttaagtgttaatatgtgtacacaaaactcaagactgcttttgatttcacttgtcatttttgggaccacagtgctaacaataatctcaaattctttagctgccaaggcaaaatgatggttgtttgctcatccagggggtaaggacttgttatgtggatgggatatagtcattaaaaattgttgcattgggtacttctctgtttcatttgttgccgttaaaatctttcctactatggcttggtaattccttgcctttctcttgtgctgttgatataggtcaaagcaataaggttcaccctggcggtacagccagcttctatttcaagatagctaattttttgggacgtttttgggtacgcatccagaagctacctgatgctagtcttgttgataaggcattcgtttcacacactggttgcaaattctctgcccttgacctacctttatcattgtgaagaatcagacaagcaagtagcctgacaccaacctatttcccaatggaggggctttcttccctttacactttccaggaatttatctgtagaagagaaaggagtgattttgattaaagaaatttgttgggtgtcaaacaaagctgggggcagagagagattttttacaaaagtggcagcctctcaaaggcttgagcctctttctgtttcttttctaaagcagtttgtgtgctgattgccagggcttcagaagcctcgatgtttgtgaaggctcaagaatgtttatgatcataaacgagcccatttcagctacaccagaataaccactggccatttggaggtttccattctgccatattaggttttcgagatgttctgctcatggatgaaaacatggctgttaatccatttgttgaatcaatgagcaggctgtaattgacctggtacttttggtttttctctaaggctgtggtcgctacacttaagagtatgaggagagccctggtttatgtcagctccagtcatagcctcttgagttagtttaatttggtgaattgtgaaagagacaacgacctggcccaaatctcctttttaaagaaagggagaatgtagcacccagtgactgaatcttacatcacgtcactgaaatgagccaaaagaaaaccttccttgctgaattaattatttttgtgtctgccgagttgatttaaacagaaattctgtcagctatgttctcctgtacattggacaaatcaaatgcaacaacctcgtgttttcttttttagtcccatttgaattcctccagcttttgagtcgaaaaaaaatgagcattattgcttagtctataactaagcaactaggataaaaagtttttctttgtagtcagcaatacatagccgtgctagatattatgtggggccaatggcctgaatcaaccctttatatgtgggtggaatgcgatgtaaagcttttaatttattattgcatttgcaaaatggcaatatcttcagaaatctgaatacttgcatatttattcaattaggggatgaatgtgtgctttgtactacagacacagaagacttgatttagtcattagttgtatactattcgtgtgtgtgtgtgtgtgtgtgtgtgtgtgtgtgtttgtttttccaaagaatctgtctctgtaaaacagtctgggtttcatcagaggtgtattttttcaatgtatagtataatatttaaaaattgctcttgacatttagctcgaattcagtaaactagagtttctgagattagcgattgcacctctgctgatcaatggaacagatggcaaattgggagacgtttggggacagtacattttgcagaataatggggtaacgtgtctacattgaagggaatatttcttagctgtgagatgactgttcgggtaacctttagcactgaactaatgaaagaagcaagcattacttaaagaagtaactcttcttttttctcacaaaaatactgatgtctcattctgggcagattgcgttaaaaaaatctagttaaactattgcatctgtcctgagatttcaaaatacctgctgtagagatgatcctctatttgtgtcactctatgcttctagctcaatgtcaacccttccatgactcttccaggcaaaatttcttttttagcctctattgatgccacattattatatttataccttgttgaaacacataccagactctattctattatagtgtatccacacccccactgcctttgattataagcttctagaggaatgatgctatttgaacaccctgaaaccaaaccaagcctcatgataaagacttgttccccaaagcaggctctgtagaacagtggtgtgagagaaaagtattctgaaggtaaaatttggtaaaagtcagaaattatatccctttacctttcagtgtacgagtgcacattagcctactaaaggccctgacaagtcttgaggtatgaaaacatgtttaattttgtttaattcagtgtattctaatctgattatggagcccttttgttgaataccaaactatcaagttttaaggaacatttcctgggatgtacctaataatggaaaacccacgtggagacctaactcttgatccatttgtttctaaaatggcttcttgattttttccacaggtgaatttttttttctaattaatgtctgatggtgtcttctgtctcaacacagtgtcagccctttgtgtaagaacttagagtagggggagactaattttaaagaagaggctataaactacctaataatatttaggatgaggcagataagggggtaaaggaaaagaaagaattcctatctaatgaagtgattgcagtgtgggtataactcattaatctaaagacagcaccaatagagttcaaacttagccacttactagctgtgcattttcacataaactgtttaaactatctcagcttcttctgtaccttcttgttcaacttagacgatactaaaaaaattgtcttgtagacttaggctgaggaacattaagtgatttttgataaagtactaatgctattgcaacagggtttcattattgttgtcttaaaaatatcatgtatggccaagtgtggtggctcacacctataatctcaggactttggcaggctgaggtgggatcgcttgtgtctaggagtttgagaccaacctaggcaacatagtgagacctcgtctctacaaaacatacaaaaattagctgggaatggtggcctgcacctgtactcccaactactcaggaggctgaggtgagaggacagcttaagcccaggagggtgaggttgcagtgagccgtgattgcaccattgcactcagcctaggtgacagagtgagattctgtctcagaaaaaaaaattatgtgaatctctgacaaaaatatacttttgcttgtccatgaaaaataaagcaaacacggaaactgagtgacatcaaaggaaaggcggtatgttggtaaattggagtattttcaagtattctacttagacatttcaaagatctaaggattcatattgatgtccatttagaatgcagtaactctaaggtggctggataagatagtctccagaaatataatgtactaagatcaatttatttgagaaattcaggttacaataccatgagaacccactataatgaaaactaaagtcaaccctttattccatggggctaggagcagggaggggagagggtcatcctgttgtttttctttttgtattctagttttgacttattgaaatataatattgacatgaatgaatgtatttttgaaaatatacagtccatcttctataacaatagatactgggtaaattagaagcaagatactcgcctcaaagacaggggaatctgatatgcagtgatgcttctctctcaccagccaaggataagggtagctaaaacatcatgtaccatcaaaaagttttggaacataagggacaatctaagtgattttgagtttatcaattgaggagcatttttcaaaatcactagattacaaagattttattttgctaggatctgcaggaacagaattagtttctgaagatcaaagtaggttctgcatgttgccagcctacatcaagttgcctgtgcagtaggagacataaccactgcccaaattatgaccataagcacaagtcatcaggtggaaaagagaacacggcatctttattggttcagtgtccctggagttaggtatgggagagaattaaggtaaatacgattttagcttaatggtgtagtagtttctagcttttgggagactgtgttctcagatgttgtctcacatttgtagagttggtagaaattccattaatttgattaaatttaattttttttgagacagagagtcactctgccacccaggctggagtacagcggtgcaatcatggctcattgcagccttgacttcctgggctcaggtgattctcttaccttagccccccagtagctgggactaaaggtgcatgccaccatgcccagctaattttttttttttttttttttttttttttttttttttttttttttttgtagagacagagttttgctgtattgactaggttagtcttgaactcctgggctcaagccattctctggcctcagcctcccaaagtgctgagattacaggcatgagccaccgcatctggccaaattccatgaattttaaatgaatgcttattctgccttaccacagagcctatgaaacagaccagcaagtgttttctaaagagtatgttcattcttagacttttgcaagcctgttctccatttccccatgattaccagaaatacctttcctgacatttactcatcagtatcacaggtaaatcagtatcaccaggtcttttcagttggttcttttctttatcttaaggatgtaccttccttcacaagaaaagggcaaggaagcgtcttttctgtagtcttcagacatttcatagatgcaatcttatgctattgactttaggcagccacagaaatatttgcttacatcatacatagtgtgaaagaaagaagaaatttccttgttgagctggacaaccattttcttcctttagcagatcagaatgtcttccctacatgttgttagagtggtaggtagagggaaaacttttagggaaatgggaatatagtatatatagaccaacattcctctgcttgggagaggcagagttgaagctcttttcactaaaaggcagtatttctagtttattataagtgatttgtgagtctcaaatgggactgtgaagttaaaggtcactaagatttgcatttatgaatggttattagggtgaatcagccttgcatttccttacatggaagttcggtttacaggcaattagagagaaaattttgaatgccatatcactgaagtattgtgagatgcccaaacatagagcttttctctttctatatttagaatcccaagtctcaaagggtcaagtaatatttagcaaaagtatcctagagtagtcatgaaatgaaaccaagatacacgtttgattttccacagtcatgttctcagactggattttgaaacagtgataggtttgagcacacgcgctttagagggctacagtggttgtgagaaatttcctgaaatgagaagagttaacagcaggtaatgtcattcctcccagaaagagtttgaggctctgtgtgttaagtgatgaatgagggtatctgacccacatctgttttacattagaatggaacattgccctgacatcctcaggagcatttgtcaagattccctggacagagcttctgtaaattacatgctgcaaatgtgtcagggtcagataagaggatatcattaactcccccaagtttactcaggactctgtcagtccctcttaatatgctaagggccaacaattttcctgagctgttttgttatatttttcattcatagaaaaaaaaaatatttgctatagtcccccaatattgcacatgttcttttcccataaatcatattaattgtagacatggtcacaaagcatattaaatgcaggcatgcgtaaatgaattaaaacatatgagaattttattatgcccatggtgggtctaacatagtcaaataccagtggtattaactggcatgctttttcatttaggtggaatgaactttttcttaatgggctttactgataatagatggacgtgatatggtcattcatcactggctagaagtaaactagaagttatatatatatatatatacacacacatatatgtatatatatacatatacatatatacacactttagagggaaggctagaagcctgaaaaaccctttatatcatacaaaatcataattcacaatggttttttaaaaaaacaactaaatgtgcatattaaatgttaaattagaagaacatctgcctagttaagaacaagtatctatggttatgcaactcatttctgcgctaattctctgtctagatttatattttagtcatcagtccgtaaagaatattgctatgaaacttaacacttagctctattgagcaataggtattcaaaataattgataaaaataagctatctctgtgattggtcacagggctggagatgaaacatacataatcccttagagtttaactgagacaatacttactgtactctttacaatgaaaacatggaaatgtatgctgcatatgaagcacacttgtctggcactcatactttttcatcatgcattaagcacagctacttgtaaaatgtaggctaaggattaaaataaaacatgcacaggttttctatctggttaggtaaaggtcagtcttggcctttccctaactctcaggatgggtgagaaggtcaccacacataccttaagagaaacttctgccttcaggcaacttccctcttacagctttcaaacagacaggacccaaaatctaattatttagatgctaatcaactgcaggataattcctaaggcatttgaatctgaggacattttcaggaaagtctctgctccttaaatttaggtttttaacctcaaagatacagttactgaaatttaaccattagatgactccagtaacacccacattggcaaaaaacatttggataaacatttgaacatttttgattggttccgaaaatatattatatctaaataaaaaaatatagtcagtagatttttggaggaaaggatggaagaataaaaaaactctttatgtcatacaaagctgtaattcacatttcttttttaaaaagaacaaactaaatgtgtatgttaaatgttaaatcagaacacctgactacttaagaacaagaaagaaaataaagacgtgaaccaagaattcctactaaagaaaaaagaagcgcctggatgtgcaccataatttactgaatcattttagatttctgataagcttcaggcactttcaactgatgggaaaaccataatgcttgtgccaagacaaatattttccagacatatcattttaaaggtaaatcttaatttggcccatagtttttatcttttttatttaatcttgcaataggaaaattaattcaagagaaatatggcatggagcaattgtaagacttagtttttcctgaaccatataatcttccaatcaagatataaacaacctatttggaattctgaaacttgagaatgagtttaaagagatcttcagaaaatgtctctctaataatgcaaaagatggaggagctgctaggagaaacgtggacataaattcggaagctttgaatttgtttttaaaggctgttcaaagaacaatttagaaacagtatgtggaacacatttcggaggtaacaatttagaaatctgctcaacagattttttttttttagatggttcacaactaaaagtaaaaagaaagagttctccttgcttccttttctaatgagacagagcagagatctttattaaagaaaaactctttctggtcattgcatctcctggatttacctggcatttaatgagtgtgatcagtgttcaggagacagaactgggtagccttgaatttgtttctttttctttgaaattgtttgtcaaaactaggcaatcaagcttctctcataccccaaattaaaaaaaaaaaattggtacaaaatgccagccctgtagtagaaatatcttactaatggtgtaaggggagggcaaaaaaatccactttacaacaaatgaagatttgattttaggctttgaattacaaatttgaaggaatttgtaggaaaagcgtgcataaaagaaattctgacattattcttaaaaagaaaatgtgactggaagacattccataaccatattggataagttcaaagaagttcatttaccaacttctttgtgcacagaaagaaatttccatagcttcccttgaaccacatgaaacgcaaaatagcttttaaagaaacatacatgaaagtgtaatggaacccttctacagagatttgaggttttaaattatgtgaggggagagtaatgcattttctattgatgtcctcactccccccaccaacacacatttttaaaaactgtaaaacagtaggtttttaaaatggtgtatatttctcaagttttctcagtgtgaaatattgaaataaatcacattataattatttattaatcgcagtttcaggccaaatgtaggaaaatgttagtgctgtattccccatccttttaagattcttgagattacgattataatatgtgaccatcacagtggaaataagaacttgtgaatgtctgtcttgggggctctatcagggaagtcagaggaacaaaagataactggtctctggtcccctctatgctctcacatcagcccctgcaagtattgggctgctgtgctgagtgctgtggctaaaggagatgccctcactagctttctgtgtgtgacaatagtgacacacaggaagaccctgcaggtgtccttcctatttggtcatgttttgggaagtcttaaagctactcagccctggaacctttgaggaactatctttctattgccctaatacggctctgcaaacagggtatcttctccacccttcaatagatatacttcaaggtcttaagagttaaatcctttcctaatgaattttctaacgcagcgactgccaaaagttgcttcatgaacaacatcataagctgatttttgcttataggaaggacatgtttcttctcttctaggtccttcttgagttcccccatcccctataattagttattgctgccttcaaagttatgcaaacaaaaaatgtatggcaggggatttttttaaaaagtttatcacaaaaatgtacatatagctcatgggaaagtgtgcatgttttgaataaaattctgctctgagctcatcaagtataactgtacatacagcattccatttctcccttaaagtgacataccattgactgaatttcaagtaagtatcttcatgaaggacaatattaatttagagtttattttccttttatttagtgccactggatatctttcctctctggactgatatagttacaaaattgctttttctaagatttcgaattttgcttaacacaacttattcatggtaaaatatttgccctgtgcgattattcccttttattaaaaaaatcacattttaaagtgtttttatgttcatgtccaatctcacccatcaggatcacacacgaaaatgtactcctgatttgaaaggagtgtgtttggcaccaaacaacctctaacttaaagactcttttcttctaaaagaaatgtctaatttgggctgaaatttcataaataataaactagtgtatcaattgaagttcatgaattttccaagtatacacttatatagaaatcatctatataagctcaaataaaggcaaaaagaacccatatagatggaaaacatatccaggaactaatttaaatgcattcttagttatgttcaagttcttttaagtagtgaaatgaagaaattgctataaacaatgctgggtagggccctaaaagaacccacattctagtgattttccatcttcctggaattgtcaatcctattgatgcttactttattttgtgactttcactttctccaaatccccaataaaacaaaattgggctctgccacaaatgatgttttgtgtgttttttttaaaaatataactaatttttaaaaattgtaaaaaaggatgttttaccacatatctcaaaaaatcttagattcctgggatgtctttcaaaatgtgggctttgctgtgttgctttgcccacaccagcccaccttcccatgtgtgtgcatagacaataactcaaatgaaagagagacaacaaaatgaaaaacaggatttctggggaaggcagggacatccgttcaaattttctgttaaaatggaggaagagtggataattgataatccacagaaggtggatctctttttctctgtcttttggggtcagctgaagatggatcagctcagagctttagttcaagaagattttacttaatcataaggattatgcaaacccttcccaaagggaattatgggatccttgtttttggaatctgagttgagatgctttctgggaagcaaaactagacccgccccccgcctcacctgcctctcagattcctgccttactggaactcctagatccgaggttctattgcctgaattatgagagttattctgcagttagcatgagggcttatagtcagggcttggttgtcatttctgccctctcctctttctcttatttgcacactttaatctctgtaggcttcacacttcctaaaataagacaggactgttatggaaatgttgtggaattgttggatactgcatttaaatactttgtaagtagatgtgtcttcgggggggctcttgacctggcgttagatttcttttgcaattgcttttgaaccctgccacagaagggtacatagtttagaaaaatcgcttcctctctcgtgtggcagttttccagctgcaaaattaattatccacttactttcaccacaaggtgctgtaagggtcagggatcttgagttggtgaagcacttcaccatgttgatctgaaagttattctgtcacaggatatttttttttttccaagttgtcttactgtccaggttatttacaaactgaactttttaagaccatgtttgcatttcaggcttgtctttccttttaacacttcatatatatatatatatatatatatatatatatatatatatatatgaaatggttgtttagagaagaaataaaataataggtaatggaggcttttacttggagaatcatttacatttcattcattcggcacttaatatgtgtcaagcattcactgctttaggtgctgggatataaagatgaatagattgctcctctcaaagctctcaccagtcaaagcaggtgactgaactaatgaatatacagtgggaggggtaaataaagtaccagagaccatcaggaaaggagtaaatatttctaattatcaaagaatggccaagataaggaaaggggctttcttgagagggaacactatttaaaaaaaaaaaggcacagagatctcaaagtacatgaaaaataacttgatttggattcatttatcttttaaaaatataagcaaatgactgtttaaaaatcacatgtgaaacttccagatataatgtatgaatagacatttttctgtatgaacagatacaatttctccctcttttcatccttttttcccccttctttgaaattccagtctgattttatcactagggacgtggtgtaatctctctctttcctcttctccttccttcttttcctcttccccctcttctcccctcttctccctccccctttccttcttctgcaactgcagtcagatgttatcgtcgggcatgatgtaatatctctgccacttagaattgggttcatagtctcctggacagctctttaaccaatttccaaagaaataaaaactggactgtcaagttattctttcagctgtaggctgcaatctggatctctctgcattttaacctcttcccaatctggctgtttttttaggtaatgggactcctgaccaaccacggtggggtacctcatcagccccagactgattacgcgctctcccctctcaccgggggtctggaacctaccaccacggtgtcggccagctgcagtcagagactagaccatatgaagagcttggacagtctgccaacatctcagtcctactgtccacccacctatagcaccacaggctacagtatggaccctgtcacaggctaccaatatgggcagtatggacaaagtaagccttggactttttagggggcaatttctcctggaagggagataaactcaactcttccttaagaaaggtgaattagaggcaagattaagccacacatgccggtatcaatttttttttttttttgcaaagccagctgactgttccagcaggggcttccttgtgtaattattttcttaactgatgtcaacaacatcttgcggttattaattgttgagacgtgaaacctga

SEQ ID NO: 11 - DNA, 728838 bp, Homo sapiens
agctgcaagtggcgggcgcccaggcagatgcgatccagcggctctgggggcggcagcggtggtagcagctggtacctcccgccgcctctgttcggagggtcgcggggcaccgaggtgctttccggccgccctctggtcggccacccaaagccgcgggcgctgatgatgggtgaggagggggcggcaagatttcgggcgcccctgccctgaacgccctcagctgctgccgccggggccgctccagtgcctgcgaactctgaggagccgaggcgccggtgagagcaaggacgctgcaaacttgcgcagcgcgggggctgggattcacgcccagaagttcagcaggcagacagtccgaagccttcccgcagcggagagatagcttgagggtgcgcaagacggcagcctccgccctcggttcccgcccagaccgggcagaagagcttggaggagccaaaaggaacgcaaaaggcggccaggacagcgtgcagcagctgggagccgccgttctcagccttaaaagttgcagagattggaggctgccccgagaggggacagaccccagctccgactgcggggggcaggagaggacggtacccaactgccacctcccttcaaccatagtagttcctctgtaccgagcgcagcgagctacagacgggggcgcggcactcggcgcggagagcgggaggctcaaggtcccagccagtgagcccagtgtgcttgagtgtctctggactcgcccctgagcttccaggtctgtttcatttagactcctgctcgcctccgtgcagttgggggaaagcaagagacttgcgcgcacgcacagtcctctggagatcaggtggaaggagccgctgggtaccaaggactgttcagagcctcttcccatctcggggagagcgaagggtgaggctgggcccggagagcagtgtaaacggcctcctccggcgggatgggagccatcgggctcctgtggctcctgccgctgctgctttccacggcagctgtgggctccgggatggggaccggccagcgcgcgggctccccagctgcggggccgccgctgcagccccgggagccactcagctactcgcgcctgcagaggaagagtctggcagttgacttcgtggtgccctcgctcttccgtgtctacgcccgggacctactgctgccaccatcctcctcggagctgaaggctggcaggcccgaggcccgcggctcgctagctctggactgcgccccgctgctcaggttgctggggccggcgccgggggtctcctggaccgccggttcaccagccccggcagaggcccggacgctgtccagggtgctgaagggcggctccgtgcgcaagctccggcgtgccaagcagttggtgctggagctgggcgaggaggcgatcttggagggttgcgtcgggccccccggggaggcggctgtggggctgctccagttcaatctcagcgagctgttcagttggtggattcgccaaggcgaagggcgactgaggatccgcctgatgcccgagaagaaggcgtcggaagtgggcagagagggaaggctgtccgcggcaattcgcgcctcccagccccgccttctcttccagatcttcgggactggtgagcagctcccgcctgagtgtgccgggatttagtgtttttagtcacattgatatgcaaccattaaataatcttcacttccaccccactttctaaaacctcagctctgcttcatcgccctccttcctcccgcaaacctccttcccgaatcagaccgtagtttcttgttttctccctgaacgcagttcaggggtcttccttcctctttagcaaccaagttgggggaaaagtttcatactcttggcagagcgccttcttctctggacttatacgctgtccgagacaaaattgggcgcccctcttcctgggccccgggacagttgaaatgccccgattacttccaggttccaagcttagtagtagatgtcaaaactattgcccttctctccctcttgttcctggccagcacagatttgggaaatatggtaccttctcagggaatatagaatttctcttcatattattgaatctcacccaactgtccccattccaaacgttggcttgggcaggtattgccagggattgtctcttctttatttatttattctccccctcccacccccacccagtctgctatgcactctcgactcatcctttctcttacatgttgttgggaaagccccagagaaactaaggaacagaggacaggagggaggtgtggaggaaggaaggaaagttgtcaagattgtcttcctttggggagtcactatgaagccagggagaaaccatcgttggttttcctgcttttcttacctttccccactcctcctttcccctctgattcttagcttgaacgtctgcagcagcagctcttgatgatagtctctggcagcttgtttcactgcagatctccctgctggagactcctaaaatgagatttttctgtttcatttactccctcatttcttgccatattcactgagttgggggtgtgtgtgtgtgcaggcacttacttctaactctttccagagtatcctttgactggaaaaccaggtggttttgaatcgatgttcttcttgtaagacaactggggaagacttgtgaataaaatatacaatgtaaatgaataagaaaggcacagaaaagaaatcaggcttttaaaaagcctacacaaattccatcaagcaaacccagcttcttttctatcattctcatcatcagaaataaatgaagttcttatgctccactggctactaatgtctaatattaattggatggaaaccattgaaaagggcccattgtagagctacaagtatcttgcatgcttgtgcacacacatacacacacacacgagtactctcatgcaggagggatattcagaagctgaggttccctagtcattgcacagaatacatactagtatgtgacccccaagaaaaacagagtgcggatgcacatttcaacattagtgttagtgacactggcacctaaagtgagcccttttcatttagtgctggaatttatatagaccatcctaagaggcactgatgagtttgatagtgccttcagtgaactgagatggaagactgatactgttgttccacccaagatgtttttgtaaagaacagctgggctttaatgtcattgtggtttgtgtggtttatacatgcaacattctgttttagtgcccagtgttttagtaatggatataaaaatgacttctctggaaatgcagattatcttctagtttcatgcctctgagcatctgtggagcttccccatcaccttttatcaaatgaccatagaatccagcagtctgtatcagctgttgtcagatgttggtgacaggcaaaagggctcatttctacagccccgaacctgccaactgtaaacaggtaggttgcatgaagctatcagtgggtgtctctgaagagtcacatgcttaattcatttaaagaatatactccactcaagtcttaaataaggtgttggagctgctgagtggggaggtttatgtagaaaggctgtgctccaagggcttctctgctattggctgtagggaagcattgtgggcatcccaagccctccctcagtggcccagtacatttggcagctggaccaagcccttatgcatcatttgacacatctagcaatgctgatttcagtaggagccaggattctgccattaaaaggcaagaaaatttggccaagcatttttcagcaggattggaatcaaatgattattgataggatcaaataagacactaagtgtaactggatgagctccccatgacctccagagagacagccagcctattgaaaagcacttcgggccttgtggtgatcatacttggaacagcctggtctctcctttctctgaggacatatgctgtctgcagttaggcagctggccatgcaggactagcctctctcacattatcattgcctccccagcctcattcagatacagtctccattgcagacatccccatggagtagatacaccttgctataccatgttctgtgtttcagacaacatgtatcattatggttccgttcattttccctatgaaaattcaaggttaggttctgacactgggattgattttgctatttatcatgtttggagaaatgggtttattatttttatataggctctgatttatagaaaaggcatttaactcttctatgatgtgggctcttcaattatacagaaggaaagtaggcacagctcagcttattttcttcctgtgtctgcccaagtgtcttgtctggaggtacacaatgatgctgatggggctatttgtgggggagggaagagctgattgttcttccatgttttgtggtgaggggcctggagcagcccatttggctcagaccaaagatagcttcctaaacctgagcaggaccatgactaaaatagtaaaaatgaaaaagcaccagttaggagaaagcaaaaccgttgcattgcttgtgatttgggctgtctgagaggacagaaagatgtctgagaggccttataatgcatgaaatgctaatggtttttccttgtgggttactgtgaattcagaaataggatcggcatttcaagtctgaggcagatcccaaattcacccattcatggagaagaggtgaagaggcagtttctgggactgtattaatggttctggcctctcccaggacagcccaaatcatagaaaagatgtctgtctgcaaggctggcatgttgcccacagctccagtttgtatcctggcttacaggtgttttgagatctgtttctgctgtcacccaggcagagggctaggggatgatgactcatgggataggaggcctatttccctgtaagcactccctccccacccaggaaagtggatacatgactttggattttacatgtactatggagaggcctgagcaatttagagatgtatgcaatgcaatatatctgacctttgaactcccatatctgtcagtcccttcccatttcatttctggagtgggcagagagagcaaaggaggatggagaggaaattggagctcccagaagggatatcagttattggaggtgaattgggagaattggaactagtccagagaagagcagagagctgatttaacagttgaagggactgatttacaatgaaagatgaaaagaattaaatatatatggctgggctaaatggcgatgaagggaaagccatggtaacaatctacaaatctctgaagagagagagtggcagtgaaggagaggagttatttagcgtggcccatggaagtaattggatcatacttgtagaagcaaacttcgggttggatatcagggaaaccttgttttctgacattgatattcctctgactatggaatggaattccaatggagtggggagtcaggtgagatgtgggtcagacaagtcccagcattcctaattaatcagttctatattttcacatattgagaagctacaacaggacagagagctgggatgcagaatggcagaaggaatcagaacctttttatgatccaaaccctggagcctttgggcattggtgtttttagaggaaaagaaaagaattgcatatacatctttgaagttggtgagaagcacttaagaaattgttaatgacaaatattttgaaattactgaatttattcttccctgccctccaattaaacatagattatttctctggggtgcgatctgtatatccaggggtttgggaggcacaatcaccagagaattgtgtatctaagatacatctatgggtgagggtatatgacaaagcatcactgagcagggcaaaaggtgacctgtgtcttgagaagatgccatcagttctagatttggtggactcctactggctacttaaaaatccctttaaatgttgagaatctatattgccatttgaaagatgaagttcatccacatccaatttaacatttcaaaaatttttaaaagagaaagaaggtccatgaggggtttttgtgtaaggcatgggaggagagtgtgattattaataaaaatgggtatctaggctggccgcagtggctcatgcctgtaatcccagcattttgggaggccgaggagggcagatcacttgaggtcaggagttcgagatcagcctggccaacatggtgaaaccctgtctctactaaaaataaaaaaattagccaggcattgtggcatgcgccttagttccagctactcaggagagttgcttgaacctgggagttggaggtttcagtgagctgagattgtgccacctcacttcagcctgggcaacagagtgagaaaggaatatctataaggaagttggtctgctgaaaatcaggaggaactggcctgaaggtgggagaagaaaagaatgagagttgatcagcagaagtctcagtgccctgccactcaggatcactgcctggcaacctcacaacatggaaatttttccagtctgacctgtaaaggaaattttgcctttctttataatcattattagtgtcctgttatggttatttggaactttacaatttataaagcatgttcacatttattattacttattaatcctatggtaggcaggacaaatgtttgctttattttgtaaatgaagtaactggaatccagaccatatttttccaggtcatatagcacaaaatggtatacacctggaaactttcatactgactagaaccacagttcccctttccttcaagtcagagttctttccactaagggaatcatctccaagtgcagattacaaagagcaagacatgtcaataggtgaaaaaatttccagtatccttgctagaagaccatgcaacaaatatttggtgggcaatagccagggcttggaaaaattccttgaaatcattgaggcccagctttatcattagaaaaatagggatataatagttcttaaatgttcctaaatggggatagtaatagttcaaggtgttgtcatgaggattaaattagatgatgtgtgcaaatccttaacccaatgcctgatgcaaaataaagtgcttcatcaatatgaaccactattgtttttttatataatagcaacagctgcactccagcatctggtcatgcaggctgtgcactctgcaactctaggggttccatatacattttagtctgtctgaatggtgccatctggagttgtaatctctatgtgtggccatgtgtggcaatcttggcagcagcagttgtgatgctgttgttctccattcaactagcttcttacccctaagagatgaaaggtgggatgtatgggaaatgaagagagttataagtgtagtagtttctaccatttcaccatggaaggcgactttctcagaaatatgcatggaaaggaggattgaagtgtggtatttacttcctccccatgaattaatgtcctctcgtaagccttttgactttggattcagttcaaagagtccaccagcatattcgcaatccagttcttttttcctacagaaggaaaccaaggcttaactttatgaaaatatgaaagttaagatggaggaagaacaagatagagatgttacagcggaatcattttcagatggcagacgtttcttaactgagagtgctctgtccaggtctagaggcactgggctactggcctctggtaactcttttattttaattagctgaagatgtgttctttctgtattttcagcatcacccttcattgccaagtggagaatatggagagaaatgtaaattaccaactggttaatggacctgagcacattaagagcagttaaactttgagactccctggagacgtataacccagggacttgagtgggaggctgcctcaggaagatccctcaatctaaaaaaagaggctaagaaccacagaacattttgtacatggtggtttctatgaaccatagctgagccattgcctccaaaagatgcacatgaacatcatttctacttgggagtagataaaaaataaggcgtgtgggtgaggatggttgtaggtctaggatcatgtggagagagctgagaataaagctatcaaggagtccttcttctttacagccattgtgttgctctgtggtctagggtgtggccaatgtttcttaaccttgtgatgaccagggctctttcacacaggtcaagatgtaagcagggagtgttggcctggtggtgaggtagtggaggaggttggaggcattcttcagtatgctttttgattaattgtatttttcagaatagcttatttttcttcagtaaattttgtgatgaatttttcagctggctgttctgagcttgggtcctttcccagggaaattctatcagattcgctttgtgttgtggtgtacatattccagaaagtgggcagagaagatctcccttggggaagatacacccaatcccttggttatttaagagtcttttttttttcttgcaccttacctttctgactaacaacaggtgcatgcagtggtaggcagtcagaaatccttagagtaagaataaagctaaaggaaggtatgaaaaaggtatgaagttagaggacaagggaaatctaggcaggcttaaagaaatcaggaaactagccaaaggaaatgaggatagattgaaccattggttatatttttctttgacccctacttatcttttatttagttttcattggaatgtgagttcatgagggtgagcatggaaaggactcttttaagcccagataagtaaagtaagtgttctgtggtgaggagaacactagattaggagctcgaagacatgaattctatgatgttctttatcttttgttagctttgcaatcttctacaactctcttaaacttgctaagcctgtatatttatatatgtattataaataaaatatatatatatgccagtcatgcgtgttttaaataacttttaaatagaaaaatagtcctttatagctatccagatatataccatttcttttgctcttcccttttcctcaagtttcaatatttcctattttattatttcccttcagcctaaagaggtctttttttgcatttccattagaataagactattgacgataaattctcttagttcctgaaggatatttttactaggttcagaattatgcattgacagttcctttctttccacactttaactattttgttcctgtgtccttcatagtttgtgatgagcaatctgccattacattgttgttcctttttgtaattgctttcaatatttttttcttggcttttggttttcagaatttgattatgatgtatctctgcatggttttatttgactttatcctgtttgtagttttttgagactcttgagtctataagtttatgtctttcatcaaatgggatttttcaattattattttctcctttttttcctgcaccaatatattcctctcctgagactctgattacacacctgttagatctcccatgctcttgagacgctgctaatttctttttttgaaatttttctctttgttctgtagattgaacaatttctattgacctatcctcaagttgattgactctttcctctgttatctccattctgatataattatttactttagatattttagtttccagtttaaatgtttcatatttgacaatgacttctgtttcttgatgagaactacctttccattcattttccagagtgtttactttcaccttatgggacatggtcataacagcttctttcacgtctttgataattccaacatctggatgatcttattattggcatatgatatctttcctcttaagaattagtcattttttttcttttatgttgagtaatttgagattgtatcctgcaaattttgtacattacattgtttggtctgagttgggtgtggtttgaacctttgctttgttctcaaagcctttgttattctgctttgagtctgtccacacctctgccactcaggtgagctgaggcccttggccagttccgtcagcgaattagcatatttccttctccagctctctttaggattctccttaaacttagagttttacctacctgtattattgctgcacagatcctgcatttagggttgcccttgagagatgacagcagagagatgataaagcagatgaaagtagagagatgataaagagaaacaaaatggggattccctccataccctttggactgaagggacccctttcccagtcctttatcctgaaagttgtggtttctaccagggtttctatttgagggtttctatcagcagctatgctggctctactgaagggtcaccatcatgagataagaaggaaaaaacaagtaaatgtagattttcctctgcactcactgaatcataaagttcctttccctgtcctttgggtgagaaagaaaagattgctttgggccccttagctgtccatggtgctaccaccacagattttctgggtgcctgcattcagttcacagacaaaagaggtaaaaacagaagacttgccttcatatgaattgcttttttcaggttttgactctcttcctcaatgttcctgattttacttttcagagtccccagtagtcattttttgtttttcttgttgttgttgttgttgttgtttcgtccagagtatttcggttgtaaagaacaggatgaacaggactttgtgggcttatttcatcttggctgcacttggagtttctcatttctatgttgaatcagagtttccatctgtaattttttcctttagcctttaatatttaatgttgtgctattctgtatttaaattatctcagcttttgtttgctgaaagtgactttattttgctttcatttcagaaaaagattttcactgggtatactttcaggtggatagcactttaatgctgttgctccattgttacatggtttgcattatttccagtgagtcagagaatttcctgagtcagagatgctctttacctgtttcctgttatgtctttcccaccttctgccttccttaggattttctttttatcataggattttagaaatttgattaatgatgtgcccttatgtaatttgctttgtgtttttcctcctagcaatttgttgatagactcttggttctctttatatttttcatcacatttggaaatttttaaaaaaattgttttctgctcctcctttctaagaattcaattacaattgtgctatacttttatggttcccgtactttattaagggtctgttcattttttttctcagccccttttctctctgtatttcagtctgcatagtttttattgcatattttgaagttcaccctcttttcttctatagtgtctaatgtgctaataaaccagcccatgtaataagttttcactttagatactgtattgattttcagctctagaatttctgcttccatttttatttctatcttcattatgtttatgtctttctctaagtccttgaacacgtataacagctattttaaagttcctttccactaattatagtatttctatcatttctatgtctacttatattgatcagtttttctcttggaaataggtcacattttcctgcttctttgcataccttgcagttgtttttttttttttttttggtgtggtgcattatgaatattccattgctgaatgtgtggacatttttgtcttcattgaaagacttttgaattttctttgacagttaattgacttgtccatcaattttatactttcaaggattattgtcaagctttgtttgagggagtttagagaagtctttattctatggttagtttaagcctcctcttaaggtttggcctttctggagtctccatcacatgcctcgggtattcaaaggtattcaatgaggtctctcctctctggttcttacacacttaaaaaacatttcccaattccatgtatgagctgtagaaattgtttggcttacagttccctgatagctattctttacttggtagctgctctttgcttagtcttgtggaatctcactgtatgaatgcacaacttaatatttagccaaagactcaagaggacttctaggcagttttgtggagcattctctctctctctctctctctctctctctctctctctctgtctgtctgtctctctctgtgtgtgtatgtgtgtctagttgtgccttctctggtttgctccctggaaattcgagctgcttcagcctttctagacaccaatctctatgacctcaagtcactgaggccactatgctctttttggccttctctttcctgtgtcagagtctggtaaatgcctctaggcaaaaaatcagaacagtgctagggcccaccacatacattctcactctttcaaggattatagtcctgtgttgctgattattccacagtttctttcaaatattttgtcagttttacagttattcatggtaggaaggatcatgcagtgctagttcttgtatcatggccaggagcctatatgataagctttgggatctaggtcatactagcttgtctcctgagataccatatagatctccatgggaggtgcgcaccaaagagaaattagacaagggaatccttttaatggagatctataagtttgaatttttgcctgaggaaatgcttatttattggtttagtttttttttcttttaaattgagcacttgccaagttgaatgaagtacagtctcttcctcccaggagttcacaaactagttggaggagaaaaggcagacaaagtatgctaataaataactccaataaaaggcagcacttgaatgctaaacaaatggtgcagctggttatagtagttggatagagggttggagaggtcaattcctgctggggtgattaaggagagtttcatgctgtacctccaaatctcaaaagcattcccttaaaggcagatgagcagtagttttcagtgcattatgggagaggtaaagtttctctgagacaggaaactatagctctggaattttagaaacaataagcttattgccttttggcagggagtcaggtcaaaggatatctgctgagaatgatggtttccttttgagactgagatagaagtgagtaaaaaataaaaacacttccagaaggaggtaatttgagaatagggtcttggagagagtgcagctttttacttcaaaagagaaggacaaaggatcttctgagttggggcaagagccaaaataatgcccagatgaagaacaattggctagagaaagggagagaggaaagagaagagaaaggagagacagagagacagaaaggcagatagacaatgtgtgtgtgtgtgtgtgtgtgtgtgtgtgctctggagagtagaaccagccagagcagagagctctaaggtgctaggtcagatattctgaactagaggttagcctggctttttgtgtctggaattttgatttgatgctagagaaatctgaacctatttaggtcttgagtaggggagatgcattttgactgcgtgttgactgcagattattcaggaaatgtattttagtgtgggtctcaggcctggatgtagagagggctagtgttggagccccgtgaagctattacaccaaataagcaatgaaagagtcagagctgggccaatagatgcccagatataagaggaacaaatgagaaggagtcaaaagtctaaggttttggaaccttgaagacttatggtttactgataaagaagacagttgggaagaggatctggtttgaggggcaagtggttggcatgacaataattctagtgtggcatccatccaaagatgagggtatctgggatgcacatgaaagcatgggcctgaagcaggaatggggaagaggtcaaggctgaagatatcgatgtgggagctatttacatgcacgtggtaatttaatccttgaaaaaaagagatgagttttccagaggacgtagagagaggaaagaaggaaggtcacagcttagatttaggaaagttcataattagacagtagaatggagtcaatgacatcaccagaaagaattttcttacaagaaggaacagaggcctctgtggatcatgtggtgttatagaagctcagcaaggcagatggagtggagagaccattgtgttggaccaagagcaattcacggagtgtcttgtacagagcaggaacaggcagaaggaagtttagagagagtgctgaagaaatagaagcaaaacgtgtttaagtagtcatttaagaagtctttgaaagaaagaagagaaagagaatgaaatatcagtgatgtcagagggttcagcagcatggaggaaacatgttttatgatagcaaacctcttaatgttgaaaatcaggagggaaaaagctaaagagaaaagatttcaggtatctgaaagagagaggataattgtatagcaaaaccattcaatctaggtgcagactcttatacaggacttagatgccgttatatctagggccctgtctgcttctggagtttcctcttaaaatagagttcattcaatcttatttaaaaaaatatttctgctactcgggaggctgaggcaggagaatggcgtgaacctgggaggcggagcttgcagtgagctgagattgcgccactgcactccagcatgggcgacagagcaagattctgtctcaaaaaaaaaaaaaaaaaaaaaaaaaaaaaaccttaaatgtatatgtatatttctggggatgtggggatcactattttccaaggcttccctgttacctgttggacaagtctgttgggaaaatatttaatagtggtcaaattctattcctctgtaatttaatgataacagctaccattgaacagtttgacatagactgctttatttagtcctcactataatgtggtagttttatgattttagtactcttttcgtttttgcaaataaagaaactgatgctcagagaggtcagataacacgatccaggttgcacagccagtaagtgaaggatctggtatttgaatttcagcctgtttaactccacatctatgatctctctgtcttatgtcttttacttgtgactgtagtttggctgacaagtattaacttctccccaacatgagggtccttcaaacatttgaagtcagttatcccacatatcctatatatttttctttgtctcctccttcttttcattctcctcctctttctctcctatcccttttctttaaaaaatcattaattcaacaaataattattgggcagcttcagtatgttagacactgtactagatgctgcacagacagcaatgaacaaaacagacatgggctttgcccgcatgggatttatagaatggtgagggaagaatattaaatgtgcaaatgaacaaataaatatataatgagaaatgatgatacatgctgggaaggaaacaaacgtctctagcccccttgtcacttttcctcattcaccacaggtttcacagtgctcactgagcctgcttcttcccccctgccccacacgccctctcctcttaaagcatggccccagatgaggacaacattctgctcctgtgatctgaccctctatagcgaggcccttgaactgggaaacctgtgttgttgcagtttagcggtaggcatgggcagaactgcaggcaggggtacaatagagaaggaaaacaacctccttctctgagatgagaagacaaatgtatccaaggccatgcagagatgaaaggcagagagcccaggagtggggccagacagcggtctcaatctgttctgtgaagtatgagcaaaggttgtgctaaacagatcacaaagccatgcatccccttccattcctcgcatcctgcctttcccttcatgctccagcccccttggacccacacatctgcttgacaaatgcagccaagggggaaagcacaaaatttactaaatagaatgcttcactgtggctggctaggtaggaaaagggattccttctctgtctccctccttccctccctctctccctcccttccttccttccttcctcccttccttctttccttccttctttccttgccccttcccttccctttccctttccttttccctttccctccttctcttccttccctcttaccttctttctttcatagtattaatcttgacaccataatttggaagaatctgattggagaaaaatgtcatgaagcacaaatgcagatttgatatatctgacctttcttctcttcagaacaataaatgtcaaatagcttaaaatgacagcctggataaccagagattatttatgtgcttaaatatttaggcaagaaacatagtttagacttaagtctaatttacatgaacatgctgacctatgtgaatcagaagcactttaagggatccatcacaagcagtggtgtttgcatttcagaaaacagaaaatgtgaaaaatcagaatagagtagaagtggtaaatgacccttgataagtaatgagaatgtttgataacatcaagaaattactttgcagcacaaaattgtgtttgcatttttcatatctgagtggtgtggtggcatctggagaaggacccacaacccacatgtcctctcctttatcagatgcaaagtattttatatgtgcatgtgtatgtgtatcatttattcccattttactgaagacatttactgttaaaacagaaggagggagaattatcttgcttcagctctgtaaatcctgatagaagtgtaatcccccagacagagtgtaattctctactcaacctcacactcaattatcatcaggaacaggctcagaaaggtgggtttcttgttttgttttgtttaaagaactctgaacattcgttaacccctgtacttctgaaaggagaggatattacattgtgttaaggaagcagaatctggaattagttctaggtttgacacccagctccagacattcttaagctaatatgaaaatagtttttctggtcttagcatccttatctgtaaaattatagtacttgctttatagggttcttttgaggagtaaatgaggtaaattttaagaagagtttagtgtagcatctgtgacatggttagagcactgaagatattatccattatcttctgttttattattattgatgttgttattaataaaggggtttcccctcattattttttgtggcttcctttctatctcatttttgctgagatctaactattctcacagttagagtttatcttgtggaaaatataactaaataaatgagggtcacaatataattctttagatattgagcactggagcagctgttttgctctaagagtgaaagttaccagaaaaccaatcctgtcccattatgcattgcctaaggattccatattgaaccagcgaatcttttgtttatttatttattcatgttgaaggattttaattaaatcataaataatatttccaaagtcaggatattcattgtaagatcttttaatttcacagcagaaaaaaaccctatttcaataactaactaggaaaatttaaaaactgtaatgtgagttgaagcagtggaaagagggaagagagttctcgaccaggagttgtgagattaggttttcattttagaatataccaagttattcttttttaatctgggcaaatcacctaaacttcctgagtctttgtttctgtaatatcaaataagtgagttctaatctctgtccttttcatattaaaatcctatgattctaacctatttcctgggctgatgctgaagcatgactgggaaggtgttatttctataaacagttgcagggtccgttagaatttcataaagcagtaataagaaatcatcaccttctctgattcttatgtaattggtaaattatgataagagctgcttacctctaatatgctttaaagaccatgactagattaagaacatttatttttctttctaccccaaaggaaaacccaaattattttgatgcttttctggatatatagtaaactcaccagagctgctttgttatggttttctgttccaatcattatagccaattgtgtgaacagaggcaatcaatcaattgattgatagaccaactgataaataaatatctacctacttacatacatacataaaaactattttctcttccttatttgggtagggtttatgttagggttgggactgagggacaagggagtgtttgactcatctgtctcagatgagggacgtagtaggcgctcagtaaatatttgctgaatcagtgaaggaagaaaaaaggaatgaatgagggatataaatgtggtatattaaaaggactatctgagcaagttctttctatctttcatagcccatgtcccagtgaatacagcttgtgtttatacattcacttgcccaattcttaatggttcactgactttttccttaattccaattcttcattctacaaatagtccctgagactttccatgcgttcaggactttgtacggttctatagggtaacaggcaataattacaagatgtagtccctgactttaaagacttaaagtctaatgaggtaaacaaaaaatataggattttgagtcagcatttggggattcaagacttgacaccatcatcagttagtttcatgatcttcatttaaactctctgggtcctagttaagtgcagggatgataccaaccccaccaggttgaggggatcagataagattatatgcataggttagtgcactgtaaaatcaaaagcactgtgagcattatactacatactttaaaataatactagatggtgtgagcttaagagctaaatgtcttcgggcaaagaacagtgagtaggattggtgagtacaggcttcctgatggagctgaagcttgatgggttttggaggagtagggtttggaatagtcaggatgaaagaggaatagcattccaggtggggaccacagagtatggagcacaaggtcagtccagtttgtcttcctgtagtgcctaaaatgagcctcatgctctactgggccctctcagtttggagaagagattttatgtcggtaagtacagttggatgggcaggatggggccaggaccttggagagcaagcagagggtgtttgactttcttgcagcaggaaacaggcagccatcaaaggcctgatgtaaatagcattttaggaagatgaaactggcaatggtgtgtggtctggattagcatgtagggactggggtcaggaatctggggtggaggagagggaagatttggaaagatgcagattcagcaggatgatggagaagaggatggcttcagaaaaacttcacaggccttggcacaaggggccgaaaaagagaaattcaagctttctagcactttttgccagcaagattagaataataatgggtcatttgatagaaaagaatttgggaagaaaaaacattggggaggaagagttgagttcaatttgcacctggggagccgagatgatagcccaactccaagcagctgtgtcctgctagctggaaacatggcactagaactcatgtaagaagtcagggctgggcatggggatttgggagtcatcagcacagagacttctcataaattatgtgctttgcttagaacttaatttcatgtctttttggaagataagagaaatgaaaagcttgctgaattatggattatgcaactgtattcaaagtaattctctctttccccctcccctctgcttccctgatgaattttgtgttctgttcttcctgttgatccacaccccctacccctaattctttgtaaactgaggaacacaataaactatttctttcagatcagaagactgtcagtgaagggattaaggtgatcgagaatgttcaccagaagatacggcgatcttcctgaccccctctccaatccttcatagatcacagggagagaggctttctttagaggaaagcaacaatttatatttataggaggaaatgtttaaggagctaaattctcagttccctggacagccctgttgtttgatttgcagcttttcttaagtaaagcactgattctcaatgagagatgagcggcttggccaataatgcaatcagataaagtagggttttcagacctggtgggtgggcttgaagctgggactccttccctggcaccaagcttgcctttgtagtttgaactgagttagcataaacagcgggtgcaacactcagaagctgaattttctttagtttaatcctctttgtcctcctcttcaaagggaaaaatttgcaagcaatttgctgagacatgctcaagaattacctgccagagagaatatcagacatgacctcagataaggcaatgatgagaagggggattggagagaagagaaatgtggcactgaagtttattgaacatctattacatgccaggcactttacagacattctcatctaatcttcacagctgcaagagacagatagttttatctctgtttcacaaatgaggctctgtggggttaagtgacttgcctaggtcaaatgactcataagtggctgaactgggatttgatcttaggtttctaagcctgaggatcccctcctcgttccaaatctgtgctttcttctcacccctgctatgaggaaaagcttgcttgcttgcttgcttgcttgcttgcttgcttgctctctctctctctctctttctttctttcttaagacattcagctgtgattttctggaagcctgtggagtaggatgaaaatcgagtggctctcatatctatctactcctcgtctgtcactcacttcccttgtccctcactccttcttgatttcttttctcttgttctctacctctcatagtgggatgtgctcctttcttcttacatgtctctctcttgaggtggaggggttaaaggatgaggagagtgatgaagcagcagagcgtcaagtccttcatctctcacagtgtcctgtgcacgtttcattgcctttctgtgaagcccagtcaagggcgtgtagatggcccatgtttgctggttactgcttctgactgtcattttgactgcggatagacattgagtgaagtacccactctgtgcaaggcaccacagtgggtgccagaaaaaattattttgaagtggctaaattgaaatttccttaaaataaaaatgagtgtgcttacgttttgcctatttaggaaataggggctaaggagaaaggagtgaggaagccagaagaggaggcagcgaccctgcttaagaagccaaggagttccctggtatacaaagtgacagcttgatatgcagccttggcaacctgccctggtccactatatggtcactgcctggtctaaaacccttgagtgtccagggctccctgttaggtggcccatctccattgacactgctcaggtggtaccccatgcagattctctactctcttttctcttcccctgagatctatttaatgataaatgaaagaatgcatgaactggcctactctcaggatagatctgtgtgtgctttccaaagcccattcatctgggcaagacagggaaattggcgtgggccagagccccttaaaatgctctcaggtcaggtcagcctttcagagaagagtggctaatagtgaggattttaggtcaatgaagaggcgagaccagctgtgatgcccatgatgatgaagcccacgaagcagccactgcagtgcttggcccatggtaagtgcatcctgaaccttctagttagaatacatttggctgcaagtaacagagacccgttcagagtagctcaacaatcaagggtgtggtatttctttttttctctttctttcttttttttcttttttttttttgagatggggtctcactctgtcgcccaggctggagtgcagtggtgttatctcagctcactgcaacctttgcctcccgggttcaagcaattcttctgcctcagcctcctgagtagctgggactacaggtgcatgccaccatacccaactaattttttgtatttttagtagagacggggtttcaccgtgttagccaggatggttttgatctcctgaccttgtgatccgcctgcctcagcctcccaaagtgctgggattacaggcatgatccactgtgcccagccctaggggtgtggtatttcatgtgagagcttgagagcacatgtgactccagggtaggttaattcagctgcaacattacaagctcaagagcccaggctctctgtctttctactctgccttcctcagggtgagtagccgcccccagggtgatgggtggctgcagaagcccttggcaccttcacacacagctgcttgcagggggcaaaaaaggggcaagggtctttggagaacaaaaatctttcccgaaggccctcactggatttccttctttgtcccatttgctggggctgcctcacacgatgccaaagtcaatcactagagaaaagaacacaattcatagtctcaagctcgagtgcacatcagagtcactggagggtttgttaacacaggcattgctgggccccatccccagagtttctcattcagtaggtcgggggtagggcctgagaatttgcagttctaacaaaacctgccggtcctggggccacacattgaaatgcattgatttgaactattcagcaatcatctcccaggcccctgaagtacctagaagccccaaatctgaaaaaaagcagaggctctgtgagcaagaaggaaggaggaagtgcctgccaggtagtcacatcatctttaatttttggagttacagatggatatcaaacactgagattagtagaccaccagaggtggtggtggtggcttctctcctccccacccttttcttctgttcctcctcttcttcctcactgtaaacttcggtgccatctgaagcttctctctttctgaacatcacattcttccttgttttgtaatgggtacacccaaagcttaccatgttggggacattcagtcctgtggcaagggctgctggtctttcagtggaagctgagctgcccgagctcagccatcagggagcttgatgtggcggttacttctaaatgagcactcattattgatgttaattgaacttgaagttaatgaaaaaggattattttacagggcttaagttgaggccaaaattgttattacaggttaattattatccttaaaaggcaccattacagccatgattgttttttatcagctttttctctggtgctgagatttcttcgaaggcagattcctgatataattagtcacctcatctaattcttaatcaccaatcacttctctccagataaaggttaatcaaagggatgtgagttgggtactctcccttaatcgcatttgatcagtttcaaacaaaccctttcttctatttttgtttaggaatgtggcctttccccgtattttcaaacctaaaacttggaagaagaattcagaatgggttcaccgaaaaaatcagacaggcctgctatggacagctctaggctgcctggggctggggaaggtggcaggaaagagaggccctgaggccatggaactgtgtcacctgctgtcctttctcttcaccctccctctttcttttattcttccctttcccttttctcttcttctagtcttgcctttactccttccatcctccaacttcattttcacttctgtctgacttcaagctcataattttgcctttggatatgactgcttttctttcatcttctctttcccctttccacctctctctatagcacaagcctgcacactgggctagaactagggggaggctgtttggctcctgctactgaggaaatataacatgggccacaagaaggactctcaccgtacccagggagaagggcagggtacaggaggggcatggacatttgaggaaagcctgagaagggtaagggctcttccttgagagaaagggaaggctgaagggaataggattgagttacacaattataaaaagtcctaggtagaaggaggagagatttaatcaccaaatcccagggtaactgaatgagagaggaggtcttgaggctttagcaccctgtctcacagtgccacactgctgactggtggagggaggagccatcagggaaatcctgctgaaaagcctcccaagagaatcctccctggggcccccaccccaccacctcccactctgatgtccctggtaacagaacaaatgcacccttcccttcctctttacaattgtttttaaactgaagtattatttatgaaagtgacatgtgaatgtactctcctttttctttactttttccttctttttattgttatttatttattaattaattttttttttgagatggagtctcactctgtccaggctggagtacagtggtacgatttcagctcactgaaacctctgcctccgagtagctgcagaaccacttgcaacctcaggtggttctcctgcctcagccttccgagtagctgggattacaggcacctatcaacatgcccagctaatttttgtatttttagtagagacggggtttcaccatgttggccaggctggtcttgaactcttgacctcaagtgttccacccacctcagcctcccaaagtgttgggattacaggcatgagccaccgcgcctggcctctgctaactttttaaaggtggattgtagatctctatttacatctatgtctatctatatctaagctctgctttgctcaaaacatcaacctaggctctttctccttcactagaggtaacctgtgttaatagcttggtgtgtattcttcccaatatttccatgtatttacacaatacagaaacctgcctgtgtgaggtaatgaaaaacccaagctgagcatcttcttacaatgaacttttactgtccaatgggatcatgtggaggtgcgtgatggagattttattcttcttacaatgaacttttattgtccaatgggatcatgtggaggtgctccacacttgtcttagcttgctagagctgccatcagaaaatcctacagaatgggaagcttaagcagcagaaatttattttctcacagttcttgaggctagaagtccaaggttaaggtgccacaggtgggtttctcctgagacctctctccttgatttgcaggtggctgtcttctctccttgtccttgcagagccttttctctttgtctcttcctcttcttataaggatgtgaatcctgttagattagagccccacccttattgacctcatttaaccttaattacctatttaaaggctggatctccaaatgcagtcacattggggattagggcttcaacagatgaatgaacgtgactcagcccgtaacagcacaaaatctgccctcccagctctgtgcttttgtcaagacattccctcttgggggtcggaggtaccctttgtattcttcttcatcttggcaaatgttcttcgtaccttaagtctccactcaaatgtcaactcctctaagacccatttcctctgcagcccggctccctgcttccacacaagggctttgtgctccccaagagcttgtgacccctgccttgtaggagctctttttgtcctgcagcttctgtggcagtttgtctccctgcacccacactaccatacctactctcccattgcaggaaacagttcatggatcctagggacacattcagtaagtttcccttacttcaggatggagagagctgtgtcagaatgttctggcatcaaacacaggttgtggggaatgtagggaagaccagggaaaaacacagacccataacctgtagcctaccctctttcttcaccccaagccactgagaatactggacagccagtatctcactcctgtggtcctcttttcaaaaacacatcggccaaaagaaatgacctaggagagcagataaactggccaataagatggtaattaagcagatggaggctcacaatgaactgttgaattgagatggctagggatctcctgaactaagccactggaaggactactaaaaggcacatatcatctagaaggaataaaataataaactatggccaatcatgcaacactcatttaaaagaccatgaattcctttctgcattgtttcctttctgtgggtttctgaaggcattggtgttgttaaggcattctggtgctggaccatagtatagccaggctcacagccacagaccagggatccctggagctgcagcttcctgcttccagcctcaattcttgtctctctgccaagcctttcagtcttaaactttcagctcattgcccattctcctttaaagaaaagctctgtgttttaacctttgttcactctcaatgtctttcggaatgaaaaaagactttctaatggaatcccagtgcactgcagtgtggtctgccttcccaagttgtcacccctccacagtgcagagtgctggggaggaggtcatcccaagtaacaactttcagagctaattaaggttttacatcattctagagaattaggatcaaccagcggcccttgtgtgtaacttgccaaatccaaatcctgccttatctccaggcataaaagctacattaagttttaagacctgattcaaaaacacattatggataatgatgacaccttgatattaagtcttcagaaaggaagcacatgacttgacatatggagcacatgacttgacatatggaggttttaccactgatggaaacatggggctttttatggttcccattgattgttaaacaaatgctacatctctctataggagatattgaccaccaagtgcatttaagaggagtatgtcggggtgtgtgtgtgtgtgtgtgtgtgtttgtgtgtgtgtgtgtgtgtttgaagcatcacattctcacagatactagtatgttcccgtcatcctcctagaaaagcaaaatagttgagaattaaaagggagtccagaatcacagaatactgcattcaaaaaggtgctttagaagtaagaatgaaacattaatagaatgatatcaccctgatttttaaaatttaatttttctgtactagaagaaattatcctggacttgaagtcattctgcttggggttttgctggtccccactaatttactaagttatcttagataagttattgatagtttttttccctgctccccctccccaggttattggtagttgtgagagctaacactttgttgaatgttttctcccctgcaaaagtcaggcttaacctccatttctcatgtagccctcccagcaatgccacgtgggggatagtattgcttttcccatttcacagaggcttagagaggttgtcccttgcccaagtatctcactgttcagttgtggagcaggagctcaggactcctggatccccaaacacctgcccttagcccccatgctatgttgcctcccctgggtttaacaccaccatccacaacagcaacaaatattcactgggggctaccatgagccaggcactgtgaaggaaacagacatggcccctgccctcagagtttgcagatgaggacagccaagttctctctgggtttcttgatcattttctattataagaaaagggtttgggtccttgacacccctttcaacttgaaagtttatgagcacttaaattatttgcagtgacttctagttttccatttcttcattcgtatcaccagttacatgcttatattgggtgactgtcatgtgccaagcactctgctaagggtttttgtagaactactgaattttgtcctcatatcagtccataagagactttaaatgaggaaatggaggttcagagtttaccttgctcaaggtcattctgcttgtaaatgtcagaactgggatttgaacccagctctgtcagctccatgcttttccccatagaagaaacttcttgagccactgttcttgaaattcagtaagttccattcatttaaacaagctaatttctattattacagatattatggaaacagtaatctacgtaactgagtcatctggaagcctgtgctgcagtctgcttattagaggcaggattgtataccagggaattcagacctgaacaggacctaaaccttggtgtttggttgccaagctgagaaagaatcctggaacattccccacagtgaaagttaacattttgccacttagaatcaaattcgggaggttgttagttataacaacaataacaataacacaaagaactaatatttatacacctctttatagtttccctggcccttccacatccattttcttatttgataagaagaaaagaataatggaatgaattgggagctggtgaacatataaaatgatattgaggctgcatggcagaaagtcagagcaatgagaaaaaggagcagggtcactcatcagaagcagatgggcttatctttaaatacctgatcaggaaggcagctgagcagtagataaatgtaaaaaggaccatgaagctgagaataaatggagcaatctttttctgaatggaaagtggctgaaatcccagggccagggaaggggaggggtggaaatattcaagaattatggcctgagaagaatccctaaagctgtcaggcagcaggggcgacaacagcacatcaggagtggcccagaatagatggccccataaatcaaggagggaaacattatggccagcgcaaggcagtactgtgccctaatggggaatgggctggaggactttataaagctgggttggccaggctctgggcacaatggaattgaccaagtcaaccttggaaaggctcaaaattcagcatgttttaaaaaaatggactagtgggtgcttagatcattctgagtatccacaagtcattctcccccctctaccacaagcttacttaaaaggaagaagtattatacacagttgggaagtatgtgtgtgggagcagggaagaagatgcattctcattgcattaatgtgcgtagagtcagtctggagtgtggggacagtctgggctctagcgtgggtggtcatggtgtcaagtcttaggtctgccacttacgaatcatgtgaccaatcccttcagctctcagccttcagattttctctatagaacagggacagtaataccttaataattgctcattgtgagggtccaatgggctgattgattgtaaagtgcttagcacagggtttagtgcagataagtgattagaagcaattattagaggggacagtggaactacccttcattcagaaatcacagtccaacagatgaagagtatagtggacagttttcacttggttatgctgcgtgaataacctcaaattcttgatactttccaacaactttattattgatgttgcttgttggtgcagtgggatggctgctgctcttcttcaggctgtcagtagattcagatctgctccatgcatcttcccatcctgtgattcaagatgaaagggcatctcctatgtgagctgaatattctcagattggaggaaactagtgcaagagagctctgagagcctcttgaaactgccacattgccccttctgcacacattccaatcagcaaaggaaatcttgaagccaaggccaacatcagtggacaggaaaccacatccttccatggtgggggtgcaggtagtaggtaagactgaatatttgcaagagagtaatagggtgtgcctcaaagggcatggttaggaccatggttgtacatagaaagccggttgactgggttagggagagattggttgaactcagtcaagccaccatttactaaagcaaaagacatgtggtcagagaatgagcttttgctgaatctttctcttgatgctagcattgtacagagagaagctggatgtcaggaagactgtgcccttccttgcagtcctgctgcatctaagcttccacctgtgacatggcactgaccttccttatcagccccttcagctcctaggcttgggtagcatgtggtcccagggaagtgtgaactgatggtgagtcattctctctctaagcagttggatgtgaatattaacacttgtttcccaggcagcatcagaattcagcattttcttatagttcttatggttctccccagaactataaaatgttctactttatgggcctcagatttgtcatttttaaatgagatgggatagagtgatctctaaggccatttgcagttcctatggtctatgaccatgatgattttacaagtgtagagaaggcatctgaagtgcttgatctgaaacatgctaatgcagataagtgttatgtcaacattgtgcttatttaagatgcatagtgttacccacattactgtaagtagagattgtcacccggcatcctctctaggtctcctgtaccctggagtttctcctactctcacctctttttaaaaatctgctgcaagacatccttaaactgtgcatgcctaatcattgttaacactcttgaagaagatgagcctttacccccaaaggaaggcctttctaatactgtgatgttacaggtgtatggaggaagacattttagggcaggaaggcccctctttttcctctattccaatttgataaatacttataaagcatccattaggtttccccccaagctatgtgctttcatttatgttgtctcttttaatcctcacaaaacccccttgaagaaaatattactatccccatttttatagatagagaacaccgagttccagagaagttaacttacccagtcatacagccaggaacagcaggtgtgagattcaaacttaggtcttcttcactgaaatttccattctattcagttcctcttttattatgttttgagaagatgtgtgctgagctatgagttgggggcttccttccaagacttgagaagtcttctggcctgtgtggcctgaggcaagtctccaataacacagaattgaggcaagggaacggttagctaccaggagaccttggttcttagatggggggacacagctgattaagtcactggcttaagatgagtcgtatatgtgaagcaggactgatggcagctaccctgccacccgctcagagattcagaggggccgtggagagagaatatacgtaaaaattctttgtaaactgtttaacatcattcaaatagatgacaatgttgttggttctctttagaaggaaatgggaacaaacctaactgccattttccctcaacagaggttctgcctgaaaaggcaatcctgtcccctaaaatgtttgttttgagggttctaggacacggcaaagaatatcacgcctataacctttttgtagtagagagtacaacagagaatttcagactcacttttagaaaactcagggcatagaaatccagatttctaccaaaggcattggtggattcaggcccaggcctgtttgactctggaaacttccactgtttcattctgaaacagtactaatacttaggttaggtatggtactaaaaggggttaccaaacataagacatagcccccttcattctagtggcacatggtctgcttgaggtgggaaaaggcacactgacataaaacagcaaaaccaaagtgctaaggggcagagggcatagagtcaattgtcaagataaatgcctggttaaagacccagcagagcttgtctctctcctacttgcagatgctctatgttcagctgagagtgcaaatggcctggaaatccttgcttaggggactggaaacctctggatgtacacgttttgaagcatttctctacaatgtctttgtaaagcatcttgctgtcttggtttttcagcttgctttcacaagagggtccagcaacagctggtggttgttcttatccttcaataacttgggtcataaagagatgaaatgactacacagtcatccaggactagcagtactggagtctgtgtccatcacagggcctttatgcacctcacctgcctgccctcctggtttctctctctctctctctctctctctctctctctctctctctctctctctctctctctctctctctgtctatctatctatatagatacagatagatagatattccacaacagtactgggggtctgtgcatggccagacccaggaagtgggtgttttcccctgctgtctctctgctgtcactttctctcggctgtcactttctctccacagcctccccactactatctatctatctatctatctatccatccatccatctattatttaaaggaaaaagtcattttaaagaaaatagatcctgtgggaatgataatttataacacctgataatctagacattgccatattttatcaagaggtttacatttcctgtaatcctgctttgaatggtatcattccttaaataagcaagtaaacattagtaaataaaattgtgttaacattgctcattagcttatatgtgatatatatagagagtatatgatatatatgtgtatatatatatatgtgtatatatatttttcctttctttccactgcagagaaaccattgtatatccctggaaacatttatttctatttaaatgtgctttaaaatgcaactaagtaaaaagacagaactttttaagaagaaagcttaatataaatctagccagactagatttatattcaaagtcactttttggttcaaattaacttctactcagtggttttcaaactgtgtttggagacagagatgctcccacagttgattcagtcacagctactcactcttgttggttttatacattgggattccccttaggacttcacttaacaaaatgttctatttcaactaaacagcttgaaaattccacttttacaccaacagcgagttccccaggagtcagaaggaaatggtgtattggatgttacggtaacaacatttttctgattgtgaggaaacatcttagaaattggcatgtaacttttttttaaagtggtttttcaatgaaaatgtaaaagatgcaaaaattttggatatagtaagagggactcctttttgggaaattaataggaattcatggacatatatcaaattttacttctgtgaaatttcagtactccagagctaattaggtatactgaacagaaatattaacaattcctttcaggtaagctggagcgtgcatttcaatgccactggtgccatgtgcctctgagttcggaagctggttcggtagctggaacagcccaccccagtggaaattctacacagggcaaaatctgcacttgtttcgatgggaaaaagggaaaagtccctttaaagaaagttggtcctatgggaatgataatttataacagctgataattaatctagacatcaccatattttatcttgatgtttatatttcttctaatcctgctttgaattgtatcattccttaagtaagcaagtaaatgttagtaaataaaattgtgatcattgatcattagcttaatacatagtttccctttttttaaaaaaaaaaaaaaacaatttattggaccatgtgctcaatgtctacaggcccaatcctccacagctaggaacagccatggtaattggataattgacttatattgccagaaaccaagacatcaatatttactagttagcaactagctgagtcacagctatcccacgagcctctaagaggtgataaaccaccagtgagtcctcctctcacagttagctttttggacttactctctcctcaaagtggatggtagagaaaaggtacccagagggctttatgattacctgacctgacattctctgccaaaggttttcctggtagcccttttaggttctcttgtgaaatctaaacacagggatgtttctttcttttgaagtaaaggtctcttaacatagcagtccttccagtaagcacaagaaaagattggctgtctgagttttaaattaaatgaagctaaccaggaatgagacaacaggaacagtaacagaattttggtgcaatggaagatacaacataatgggcttgtcaagcctttcctacccacagtgtgacttttaaaatgtccatactggcatcacttgggaatctgttaaaaatgtagaatccaaggcccaaccctcaggcctacccaaccagaatctgcactttgacaagattcccaggatggcagtttaaaaatataggcccaaagtccttgatcctctctcattgagaggtgatgggctctatgtccctccccttgaatctaggcaggcttgtgactgtttgactaatagtgtgtggcagaaatgacccaggatgacttctgagcataggacagaaaaggtcgtgcagctttctcctgattctcttgagatgctaactttgggagaagccagccgccatttaagacttccaagtgctctgagatacccatgaagacactgtggccaacagccccagctaagcccagacttcctgctattcttgctagattgtcaggcatatgaatgaagccaccctgtgccctcaagaccagctatctgccagctgaataccaacaagtgactccagctcatgccacatggaacagaagaatcaactagttaaaaccatgcctgaattttgtaactatggcatttatgagatataatacaatggttgttgctttaaaccactaaattttggggatagtttgttaggcagcaagctaactgtaggcccagtaaaatgtgaaagcactggacaaaacagcaataatcaatcattcagggaggcattgagaaaagtccacagagtagtcaaaatgcttgggtgggttaaaatattcctgatttcaagtgagaatgttcctcattcagtctttctcttcccttctttactgtgtaaaccatgggaaaccttctgataagaatttgaaaattggcatttaataaatatccaatttgccaggtgttgagctaagcgctgtgctgtgttatatcagctaatcttcataaaaaccttttgagctaggtataatgattcccatgttgtaaatgatggaactgaggccaaaaggggtgatataacttgtgcaaagtgaacttctggaagttaaatataggtctgtcttacttgagtgtctctttcacccgggttttgatggcatgagactgagatgcacttgaccacagtcctgacaaggtagtgttagctaagggcaatcttccttctttctcttcccttgtgggaggaagtggacatggctggggccataggcctgagttttgagttacatctctttttctgtttagtctcttataaaagggctaacaaagatgaaggtacaggcaaatagataggtatagggccagggtactacacatgcatgatggattattcttagttaactggctgaaatgtacacttgacttttcaacaacccctgcacagttgaccctttacacagtcaaaaatccaagtagaacatttgacttcccaaaaacataactactattatgattaaccactaatagcatactgttgactgaaagtcttactgataacataaacagtcagttaacacatactttgcatattatgtgtattttatactgtgttcttacaataaaataagccagaggaaaggaaatgttattaacacaactataaaaaagagaaaatacgtttactatttattaagtggaagtggatcattacaaaggtcttcattatcttcaagttgagtaggctgaggaggaggaggaaaagggtgggttggtcttgctatctcagaggtggcaggagcagaagaggtggaggaggtggaagagaaggcaggagaggcaggcatatatggtgtaactttatggaaatacctagtaatttctgtctgacttttttgctttctcatttctctaaaaatgtttctatacaatatcaattcttcttccaccatgtactttagtttcagcaccctcatagaaggatacatgttgcaaaagaagtaaaaagtagttttgagtaattagaaccctttttctggattgtctactgtcaatttgttttctggaactgcttcttctgtgtcttcctcctcatcatctggcactggtttggaggcactcatctccatcaagtcattttctgttaattcctttggtgtggtttctattagctcttgaacttctccaacacccatatcttgaaagcattcattctccaccctttttttttttttgccatatccataatctctttcatgatttccttgattgtcataaatcctgcaaagtcatatacaaaacctgggcatggttttctcaagcaggaattgattgttttgggcttgatgactttcacaacgttttctataacaacagtggcatattcaatggtgtaatcctttcagactttcgtgatgttctgtttgttggggttctcttccacagcattgacaatcctttccatagagtatcatgtgtaatgagccttaaaggtccttgtgaccccctgatctagaggctgaactacagacattgtgtttggaggcaagtagaatacttcagtgccttcattgttgaacttacaggtttctgggcaacaaggggcattatccaatatcaaaataactttaaagggtagtcccttactagcaaggtacttcctgattttagagacaaagcattaaggacaccaatccagaaaaagggtctcagcatctaggccttcttgtataactccaaacctgtcgcttttctcttcaaggtttaggagttagcagctgtattgataagtcctgatcataaacccatctgcatttgcacaaaatggtagagttagcctatcccttcctcccttgaatcatggtgctcacttctgttcgttactcataaatgtgctttgtggccatttcttttctgagtagggtactttaatctgcattaaaaatctattcaggcagatatcctttctcctagataattttcttcatggcatctaaaactcttctgttgtctcttggtcagcagaagctgcttccctgttatcttgacatttttataacccaaactttttcttaaaattatcaaaccatcctttgctgacattaccttctccagttttagatccttcaccttccttttgctctaagttgttacataataacttggctttttctcaaatcacattagactctataggtatggctttcttataacaatcctgcattcatataaaagctttattttcaatctgacataaaaacgtatttaccccaaagtgcaaggtttttatgcctgcaggtgtagccacagcaatggcttcacatttttttttttacaatggtctttatgctggattcatttatcttgaaatggctggcagctgcagacctcaatctatggcacatatcaagcaattcatctttttcttgtaacgtcatgacttttctctgcttcttgggagcagttccagcatcactactgtcactttgtatgggtcccatggtgttattaaaggtttacagtattgcactaaacatgatgaataatatgtgagaactatgagagatcacattttactatgatatgaaatttactggagagaaaactactcatgttttttttaacatgaagattttaaacagattcaacacttgacctcttgcaatagtaacaggtggttatgaaactattacagtagtacagtattaactaaaattaatttcatagttatgatttaatgctgcatctttacatttgttcacatttctctcaattatgaacaatgccatgtacagtctgtgtttgtgtgcacaataagttttaatacattttaacttatagatttgtgtatgttttatggtagtaaatgataaaatagactagtatctacatatattttatgattcataacatacataactttttcttattttttgatatttccaggctatgtactatatctgtgagttttctcaaactgtcacaaatctccaaaaaattttccaatatatttattgaaaaaaattcacatgtaagtggacccgtgcggtccaaactcctgttgttcaaaggttatccatatttaattggcatatgagaaaattccatcttactcttcaaggagtgagcaggtctgagcctagtttttaccccactgaatctgagttagttggcttctctgtattcatctcttgggaaaagaacatgtttcaattcagcattctttactgagggcccctgtgagcctggtgttatgctagacacagttggggagatacagtggtagacaagtcacagcacccatcctcagaaattcatcatcatgcaccaaggaatatcacagggcagaggccagaggatggagagtctgggaaggttttctggtgaagatggcctaaacctgggccttgaaggaattcactgaaaataaatgagcttaacagcattaaggcagtaggatacttaaaggaaaaacctagaataaggaaaagaccaggttggggaatggctggcagacctcagtagctggagttagcacaggcttggttgctggataaccattgttttgacctgcctaacagggaagtaagggattctttaatgctgtacttcttttcttttcttttcctttcctttcctcttttctttttctttttctttttttcttttaccttcccttcccttcctttcttccttcctccttcctctctcccttcctctctctgtcgtctctctctctcaccctctgctcccttccttccttccttcatgaaaaaattctctatcaatataaacattaagcttatttgcacttccgtttatgaccaaggaaaaacattagagtaataggtagagtgaccagctttagcaaataaaaatacatgatgatcagttaagtttgaacttcagataatcacatctgatgtttacaatatttgggatacacatcactaaaagttgtatttgttgtttatctgaaagtcaaaatttaactgggtgtcctggattttatctggcaactttagcattaggtaaacataaacagcccttttgacttctcaagccaggtgaagtgatgcctccttggtattatctagttcgttgtcgttgttgttgcctgtctgtcgccaggctggagtgcagtggcgcaatctcggctccctgcaacctccgcctcccaggttcaagtgattctcctgcctcagcctcctgagtaactgggactacaggtgcgcaccaccacacccagctaatttttgtatttttattagagacggggtttcaccatgttggccaggctggtcttgatctcttgaccttgtgatgcacctgcctcagcctccgaaagtgctgggattacaggcatgagccactgcgcccagcctggtattatctagtttttataaacaaattaagtttcaatttaactcactgtaatggtttatattgagacattatgttttgcttcatagtttttattatttccattttttagaaaaatgacttgtttgcaatttgtggcttggtttcttcttgtctggctttattctcttgattttaaactttccggtctgacagtcgagttctagaagttgttctgcttcaaatccctcgagatttgttttgaggggacatcgatgctctcacacctacagtccttcacaaccttttcatggccagcttagaaatgattaagtttattgaggcaacctcagacggagtccctgtttgcagatggaggaattgggtggggggactgtgatgtgtgtgtgtgggtcttcactgagctgctgaagggctgagggtcagatcagaagggcagagccaaaaaagtcacaccccattctgcaggctcctttggccttctgaactgaggaagctctagttgtttctccctccaatctgctgggagtagaaactacagaaaatttgaggtttaaaatgagggaaaatgggggagtacaggtaatgaaagtaataatgagaaaataattcattttcacttggaaaaggtgaagaggatcattttgacttggaaaagatgaagagggtgggggattgggaaaagtttcatggaggaagaggcatttcagctgagccttaaaacagctgggtagaacttttgccccattcttgcctgtgaaatttcctttcctctcccagttctacctcattactttgtaaagagtttaaagcccacgcaggaggcggggagacagccagcagcctgttgtgtctggacaagctggcaggagggcccgccccacaagtacaaaagtttgccatgcctgacaatgccaccatgccctttgctccaaagtcagaacaattaagccccatctatctttcttgcatcctggaagacacagaaatgctcctctctgaaatttgataaaagcaccaacctgccaatcagaagagggaagatcataattaatgataatagcctggttttaattatagctatttagcaagttagcagaacaataccagtaaaacagctctacactgagtgggtcgggagcagcctgctgcttccttcagcgttcacttagtggccctggaactttgcaaggctcagctctttggaaatggagggattggaaatgagggcaaagcagcctgcattcctctttctccaggaagagatttctacctttctctgttccatacaatttgcaggtgcatctagcatgagctggttgtccgtgagactacacagttgaagacggacctacgttctgttggagtagaggcaagagctcagaaatgcatattacagtgaggccccttagttgaactgtccacccttggctcctttctctgtccggggccagatctagactactaaaaagttaactctggaaggaaatttagagaccctttaatccagagagcttcaaaattttaaaggccagaaaagcagctctaactgaagaggaagaatgagaaagtggccacaaaaccttgcttccagcctccatcttgccaatggctatagccccatggttgctccatgaaacacttaggattccttaaagaagcaatttttcaggctcacttttatggcatgggtactagaagaaatgtggctttcccataaccaagcacatagatattgtgagaattaaaacccagatctcccctttcctccgaggcgtgtgtgtttatgatatcccacttgggctattctttcagcactgaaaatccaaatatacctagccatagatccctggggacttataaagtaggagcttaagtgggggtgggtgacagccactaagtcaatggcttttaatttggtccaaagtggggagtccatagctttcatcagcttttcagcaggatctgtgaccccccaacatttaaaaccactgccctgaggttactcagcaactcagccaagggctctgatacaccccgacttcctgcttccttctgaggtcagaccatcaccccattcctgccctggggtacatctgcctggccagctggtttttcctacttcacagctaattctgatatgaccaggacccaatcaagatagaagctgataggcaacaaaggtatggagcaggatggagaggagactgcctcccaaggcagccaggggaagattttctctgagagatgataaagtggccttgtcattaatgaggcagacatctctccaaggatgggtctgcagaaaagatggcatttcccaaatcccctttctgacaagacagcagcctctaacagatgaagaggaaatctgtagtatggagcttcttggatctgctttaaatctgccatgggacattggcagttggagaaaatcatctcaggtgataaagagttggattagcatcagatgactgtgaagtaataatttgtccctttgaaataattcaggcggcctttcttttctttgacagattcaggtccatgaagtttcggccttgttagttatcagatttacaggaaacctactgactgcttcttaccaaagggaagagaagtttttccctaaaagaaaagcattcttttgggatgaatgacctagcattcatcctttctcttccctttcataagtgggcacgtcctctttgtttcttaggaacaatcactctgtcactttggggagaaaaggatagaataagtaccccattgtttgagtcaagctgaatgaaccattatcttaaacgtgagtccttcagaccctactttcccatgctgtcagtctcctaggacatgagtggacagtgggatttgtttgggaggtgtctgatgcctaaagagctggagcagaatagtttaaaacaggttgccatagacagtcattgatgagataaggagcttgcacaaggatgtaaatcaccttcatcactaagtttacaagttagttcagttgacactttttttccttgcaagacctttttgatggaggaagcagtgtgttgctgcatgcatagttgcacactgcttacctgatcaaccacaagcactttggtttaaaataagagtatttccttgtaagctgttttgtctaaagtttggaagttttccaagccaaattcttttagaatccaagaaaactgcttgggggagggattctcattctctgggtcaggatcgtgtgtcctgggctgccatgcaggcataggctatgtgtggacagtagccctttagtaccacgcaggggtgggtcatatatcctggttcactgagttcaaaggatcttgtgtctttggagtcaaagaatgctgggtagaattgacttctgctgactgacactccctggcatcagtcctgtttcttgcctgcatactgtgtgggttttctgcttcgactttagccaactagactactatgtttctctgcagcattttgccctggattctctccctactccatctaccagcctcaccttctcaactctggattcctggccagcactgtcccctgattttactttcctcttagacctagtaaccctgtatcccacatatctgtcaactacaatgctttccagctccccacccagctctctgctgtgtctactgtcactgcactggctgaacctccattccttagagtcctccttgctccataatctcatgagatgacagttcctttatcatagtaattggcaacttgtttatcctccaaggaagactggaaatttctaagccccaatagtgacctcgacctactagtaacatccaggtctgagctaggggaagttgttttaaaatgcctcaacaggacctttcagcatatttgcctaggaatgatggctaaaagaacaaaacttaggcttgggattaaatatggaccttacaatttaccagttgttagatctcaggcaagtcatgtgagcctcagtttctcaatctataaaatacaaatgactgcaggaatgttgtgagagtaatagaggcagtgaacagtgtacttaatacaggcttggcttataatagttttcgttattttcaatcaacctcctagagacctaatttcccaaaggcttataactttttctctcgatttctgtgcctcttgcccttcctcggtgggtagaatactgcagctccacactaatatttcttggaggcaatcaaatccctttacaaatggtaaacaggtggcttcttgctaaacaaaaagctgtgtacttgattgatcctgcaatccaacaaaatgaaggaggtagctttttatcttgtacaatggatgaaaagccattcttatcaaacaatgttctactcagcttttctcccaagttggggtggatgggataatgccctctacagattatggtaaacaggtgggcccactaccctataatctggtagtcatgtctctcttctgggtctgggaaggaagccagaatcctagggttgggcagagggaataggaggtttcctgcctttgctttactgggaaccatatggcagccagtcattccatggggaaaagcagcctcctggattctcccctaggagccaggaggcaaccacaaggagcagcgcttttgccttgaagacctgactccgaaagtacaggtaggcagagcagagccagcgtgtgggaggggtgtgggagtggggtcgtcacccatgatatgctgctacgtctgtgaaattctgagccaatgagatagttggtggactgaggcctcatgaattcattcagttaaacaatgaactgacttacccactgaatgaatgaatgaatgaatgattacttaatacctactatgtgataggcatggtctaggcgctagggatacagcagtgaaccaaacagaaaaaagtttctgctgtcatggtgtttatattccagaggagagaacagacaataagccaaaaaatacatgctggtaagggtcagggagaaaatgaagcctgggaagggacagacagtgataggacagtggtgctcatttacataggatggacagggaaggcctctatgacaagctggtgttagaccaagaatgggaatggcatgagagacagagccatgaggatatctggaggaagagcacttaaggcagaggaaacagcaagtacaaaaagtctgaggtgtgagtgtattttggctcacatcagcctccaacttaacttataaacaggcaaaaagaagttatatatttatgtttatttttgatatgcaaatgtgataccacaagagtcaaaggagacactgatccttaagaaaattacttcgttgaacctctgataatgtaaatatgttggattggattagctctaagctctcttccagtttggagggtctgatttttactatgagtcctgggaggttagatatttcagggagaagtcaggaccaaggaagctaagaaagatggaaggatggacaagaaaaaactggtgggacagggcctgagagctggttcaatgcaaaggtgggatctacaaacacagagcattctaaagggagaaaggatcattattgtcatcttcaccttcattatcatccccaacaccaccatcatcattatcaccaccatcatcaccatcatcatcaccatcaccaccatcatcattaccatcaccaccatcatcatcaccatcaccaccatcaccatcactaccatcaccatatcaccatcgttaccatcatcaccaccatcgccgtcaccatcatcaccatcaccgccatcaccaccatcagcattattgccatcaccattaccattaccaccatcaccaccaccatcagcatcatcattaccatcaccaccattaccactaccatcaccatcaccatcatcattaccattaccaccattaccactaccatcaccatcaccaccatcatcacaattgccatcaccatcatcctcaccactaccatcaccatcaccacaccacatcaccatcaccaccatcatcaccatcatcattatcactatcaccaccatcaccaccattaccactaccatcaccatcaccaccaccaccaccatcaccatcaccaccactgtcatcaccactgtcatcattaccatcactgctaacatttaatgagtttatcatgtgccagacattggactaagcatcttttgtattatttcctttaatcctgacaacaatagtatgcagttgagagtattatccccattttatgtatgagaaaactgagaatcagaaacataaagtaagctgcccatggccatagaactggcaaaggcagggtagataacagaatataatctcaacacacacacatattgctaggcagtgcccgtagtccagagtgaggatgaagcagagaaaaacagacaagggtggggagggccagggaaaccagaaacaccatttgactcagcaatcccattactgggtagatacccaaaggattataaatcattctactctaaaagcacatgtacatgtatgtttcttgcagcactatttacaatagcaaagacttggaaccaataaaaatgcccatcaatgatagactggataaagaaaatgtggcacatacacaccatggaatactatgcagccataaaaaaatgagttcatgtcttttgcagggacatggataaagctgggaaccatcattctcagcaagctaacacagcaacagaaaaccaaacaccacatgttctcactcataagtgggaattgaacaacgagaacacatggacacagtgggaggaacatcacacgccggggcctgtcgggggtaggggacaaggagagggagagcattaggagaaatacctaatgcatgcagggcttaaaacctagatgatgggttgataggtgcagcaaaccaccgtggcacaggtatacctatataacaaacctgcacattcagcacatgtatcccagaacttaaagtaaaatgtaaaaaaatagtaatggtaaaaaaagaaatattttattgtggtaagtgtacaattgagtgacattaagtccatttacaatgttgtgccaccctcaccattatccatttctagaacttgttcatcatctttaatagaaactctgtactcattaagcaatgactccccattcccccaccctagtaacctctagtctactttctgtctctatttatttgcatgtatcagaatttcattcttttctgaggcttgaatgatattccattgtataaatataccacattttgtttgttctttcatctattgatggtcatttgggttatttctaccttttgactattgtgaataattctatgaacattggtttataggtatctgagcctttgctttcaattcttttgagtgtgtacctaggagtggaattgccggatcacatgctaattctatatttaacttcctgaggacctgccaaatacaggaatgttttctaaagctctttaggtgattctaatgtgcagtcaggccagaagagctgagtacaggtagggactgataaggaagttcacttgatgagcagggggaaggtgggcactaggaataaagacgtatcttggtgtgaagtccaaggtgtttgtatctgtgcctccaatgtcatttacaaaggcccctctgatatgggaattactaccctttgaatcaagaatccactcttgtctcccctgttgctttcttgtgggattttctgaaaatgattttcccatgtatatttctatgcaaacttgtctcatgcttgctttccttctctcttcctggcatattgagaaatgacattggtaatttggagacaaaatccccaaagagcttgaacaacatcagtagtatttcatctaggtgcatgtgggccgggaggtcctgtccaaggcatagtaactgctttaggtaagggttccagcactagccctgacttaaattgtccaaattttcatgttgtctgagttcttctcaagagagaggaaaacatctgatctggcttatctgatatttcactgagtgtctttgggtttagcttgtcattgccaaggtttatttcaactatgtcagcctttgtcacacgaacacagcacttttcgtactgggcttgagttgacagtcatcaaacattgcttggtcctgggtggcgggggtggggtggggaccagagaagaaagccatagagaagggaataatctcaccattttttgaagtcacaagaacagtcataccaacaagtgcttctgtatgcataaatccttgagcaatggtacaagagaatttgtccatacattccagtgcattgctatatttggtcagtagttaatgggtgctttgatggtggagcaattcctgcttagggttggggaggtcattgtaaggaggatcctttatggaaccggtatttcttccactgctaaatttgggttctgctgaaagaaagtgcttccagtacaaaccaggttcccatggaatctgctttattgtccagaggctactgctttgttggggacattaaaagcgattttgatgcccagagtggaggtgattatcaggcggttattgctacccagtcattatcactgctatcctgggtaatgatgttctgcttgtcttggtggcattttcatatcagaggaactcaggaagggtgagttcagctccatgggcccctgctttgcccaggaagaggccacgatgaggcatctgcttcttcctgtctggcttcgtttaagactgactttgactccagatgctcaattctcttcctagaatttggctttaggcaccttctggattctgtctctgggcatatttctagcatcttggtttgctccactgattttagttgtcccttatacttcccatctctgacttggaacaaacccttgagcacagtcctcatcactgtcccccatcaccattccaggtttcccattctcagtgcctgcacctgacaaatgccagcactctggttctgccccagcttctgttgctccagtggcatgtgctgacctggcttcagaagctctctgggtcccagcacacatcttttctgcagccgcttcctccaccccctacaaatgtcattctggctctggatatggtatttgggagtattgaggagaagaggcatctgaaatcaagccaccaaattctagactttttatcattaatcatgagaaatgacacttggatctcttgcctgtttgagatgggagcccatagcactgagctgtcactttgataaaacatctgtcagtggttggagccacagcccagggtggataccaccagtgcccctgactcctggagggagtgtggctggagatacagtcagctgaggagctcacactgtctaagacactttcaaagaagcctttgggaattccctggaactcttccgaggagagatgttgtgtgtctcttaaaccacttgctttttgacttgcaaatgttgcagtccaacaagttcttctgaatgcacacatctttgggcagtgggacagaggatttgtctgtacattcctttgcccaacttgaaagtgaagagagctacttttgggcagatctatggcagagattagaaaattgaaatttaaagaaacatagttataagagaccttagtgattatagagggtcactgacttacagtaggttgacttatgatttttcgactttataataatgcaaaagtgatacgtagtcagtagaaactgtacttcaaaatttgaattttgaaattttcctgggccaatgatatgcagtatgatacccttttgcaatgctgggcagcagcagcgaacaaaggcttccagtcagccacacaaccatgaggataaacaacagtctatggtatactgtcctgccaggtgattttccccaactgtgggctaatgtaagtgttctgagcacatttaaggtagcctaggctaacctatgatgttgtattaaatgcacttttgacttacaatattttcaattactctgggtttatcaggacataaccccactgtaagctgaggaacgtctgtatctagtttaactacctgttttgtctgctcaccaagtgaggaaattgaggcttggaaggatttcaggatgtccttaatatcatgctctctgcagttcagctgcatcccctcccctgctctgtacttaaattccttgactcccaacaccttcaattcttctgaattaagaatgtttcagataccagttcagtcaactccctgtcattgttcaaatattctggggtctcctctctgaaagcctctgagcttaatcaaaaggagaagcaagtggagagtgtgaggtttcctgaagcttggatctgtgggtcagtgtgtccagcatgccatgagatctatgtcagccacgtacttactgatacccagtctagggcttggaggacaatgggctgcctggtttctttggccaggaaggcatgttagaagacccgcacctctatcagatatgagtggtgtctctctcacctgatcgggcaggtaatataattgccctcaatttgtgattgcttcttcaaagctaatgccaggcttttatcagaattggtctaggatatgctgtgaaccatctgtgtgaccttggatgagtcacttcctctctctggacttcagtttttctcctatgtaaaataaatagagctgctgatgtctaatgtatttttgtgggggaggggactcatgtgatattagtagcaaccactgtagagtgtccaaagctctttttaagcacatatgtagtcaaggcaggtttcttatggtcaggagtagaattagagccattggttgagagtggattctagaatcagaggttctgttgctcttagatgctgggcatgctctgatttgatttttccttttccatgctgcttgtgcctaatggccctaagctccccactgctaagtgaaggaccagccttggactcccatctatgaatgatgagtgggcaatagtgggaagaactatacagggagtgtagttgtcaatccaatgaagcctttccaggacattccgtccagtaggattccaggggtcagtgcaggatgattgcatggctctattatggcctagataatagttgcccttggagataacccgggagagcctggattagtttagacacaaacttcctctaggtgaaaggatgccttcactggtggttggctgtaggcttaatgtcaccagggatctctcctctgcagtcaggcatcctaacccttaacgcttggcatctgtcaactttcctaaagccaatgggttttataccaaggttcatgcgtgttgaccagccagacatttctgtccccacaggattgaaaaaggaacataaaacacactcatgcacaaactgagggctgatgcgtaaaacagtcctggattcctcactttcctccaaaagaggttagctaagctgccctgtgatcctgcatgaccttgtggttcctgtgggcaatgctctttatcaaagacctaaaacacttaattgttcctactggaaaactgagatctaaatcttcatcagttttgccctgatttctttttcttattgcctaaaaaaatgaccaaaacaaaaatgtatgaagtagataagaaaattcacaggtaatccctaagataaccaacaccattagtttaaggtacatcttcttagacttttttatttgtagaagcagatgtatttttcatatttttatttattcaaaattgtattacatgttccacatcattaaaaagtctttgtaagcatgattttaataaataaataatattttctaaaatagataaatcataatttgcttaactatttctttaatggtggttgatatggtttggctctatgtccccaccccaatctcacattgaattgcaatcctatatgttggaggaggggcctagtgggaggtgactggatcatggagctgacttcccccttgctgttctcatgatagtgtgtgagttcttatgagatctggttttttaaaagtatgtaacactctcccgttcacactttgtctcctgccagccatgtgaatttttgcctgcttccacttcactttctgccactattgtaagtttcctgaggcctcctcagaagcattagcctgtacagcctgcaaaactatgagcttattaaacctcttttctttataaattacccagtctcaggtatgtctttatagcagtgtgagaacagaattatacagggataatttaccctaaattgtttcaagtatttttcttttgttttattcattatgatgtgtgttgtcaaattaactcaccaacttttaaaaaaatgtatacttctaccagcaatgtatgagactactcagctcacaatacaccattattatcattttgctatcatagatgaagatcattattacctcattattattttaatttgaaattcttgataaccatcaggttggatatttaccatttgtattttctcatttagaattgttctgtttgtgtcatttgcacattaatcaattaggatcttaatgtttttgttttgcatatttgtttgtttttggtatttgttctttgcttataatctttgtggcagatacagtttttagtttattttcttttaatattgcatataattttttggcatgcaattcaatccattaatattttcctttgtaattcctttgcttttatatttggaaagcctttccctgcaagaagtaaaatatgcctttatccatactttcttcttcctcattatttgattttttaatataaagttttttgatttatagcaagtagatttaagtgtaggatctaaattgattttcttccatatagttaaccaattgttccagtgttgattttaaaataattcgttccttccttactgatttgtgatgcttcctttaacttctattaaggtttgcttctgggctatttattcttttctgctgatctctgttaggggtaatattgagacaattagatagttattaggtcaagggatataaaaacacattgatcttaccttagcctaactatcttctttcctcacaagatgcctaaggaaggtatatattcaagggacatgcaaatcaaggtaaattttattatttagttaaggtagggctctatattttatgtggctgttccagttatctcttgttatatggttgcatagcaaaccacttgaacttagaggtataaatcagccattttattatgcccatggattatatgggtctggaatttgaaaagggtacagtgaaaatgtcttgtttctgttccacagagtctgaggaagactcagtagctgggggtgacttaatggctgggggatgggtgaaagacgtttcaaactctgtctcctggtcagcagtagctatcagctgggacctcagctggggctgtcagccagaatacctgtatgaggtctctgcatgtggcttcttgggcttcatcacaacatggtggcaggattccaagagtaagggtgccaggagaaccaggtagaaggtttactaccctttatatgttacctcagtagctatgtagaataactctgccacggtcacaagtctgtccagatttaagataagggaacatcaaccccacctcctgatggaaggaatgtcaaagtcccattacaaggaaaacgtgtgggatgggagacatttttgtagccgtctttggaggaaggtatgatttgttagagtgaggaaatttggcaagctggattagagcataaggcttagactatttgtcctgcttgatgttctcttcccctcccctagatatctatatagctcactgcctcactaaccaccttctcagtgaggtctctcctgaccgaccactctatttaaatttgaccttacacacactctgaaactctttattgctcttccttgctttgtttttttcttcaattacacttatcatctcacatgcaatatagttgtccagtttattatgatattatttactgcctgtctttcccctgtagaatattatcttcacaagtgcagaatctttgtctgttctgttcatggatgtctcccaagtgcctacaatgtgactaatacatagtaggtgctcaaaataattgaacaaataaatgactgaatgaagggcaggagccccttattccactccttctcttggccacctcccatcttgaggtgcctttggaaggccagagagaaaaccagaccatcttctctccttccttttccttttcctacctccttgccttccagctccaactctacagcctttctgctcatcactacctctttcgtggccagcctttgctctgctgtagccaaagtagggcatgatctcaaggctttgagcttcccagattacacacacctgttcctgccaccttgctctccacccgattatgcagggtccatgtcttctgtatgtaaccttccaatggaaatgaggtcactgctgtctgagcagctgcccactcctcccatccccaactgtgtctgtagtcatcttgctgcagcacacccctcactcaagcaaagcaaggagacttgatcctcagaacaaccctgagaagcatgaaggtcaaatataggggatcccatttgcagatgaggaaactgaagaaccacatagtcagcttgctgaggtcataaagaatggctgctggaacaagggtgctcaagcttggaatccatgaatctccattgaaatgtcacagtccccttctgaaagtggtggctgcattaccttgtggctctgggccccttctcagtatctttgggcttccatttcctcataaaggaatttaaaacacatcccaagttatgaggcagttgtaagatcttaaattgtcagagacaaaacggtcttgttgcaactcacgaatctgttgaataccatgaacacagcaataaaatggctgaatatccttttgggacaagtgaaccttgtcgtttgatcaaattgcctcccagaaataccattttgactatttttaatacagaagcaacatactgagcaaatgactattttggttatggttcttctactctcgctaccttcgccctggagaacatttagacaatctcttaatgttttttgttttttgtttttgtaaggactaaacttccttaaagggacatgaggagacaaaaataactttattttgccatctttgacatgctcacttgagctctgggccttgataaaatggggactgttttctagaaggtttcttttaaatctaacattctactgttgtgccgtggagtgtcttgcagaatctggaggggctggaggctttctttatgtaaatatattaatccttccacccaccccagaagttggcatccagggccagctagataataaattatgcccttcaattattgaaccagtgtatgtatttcagccaaaaggttaaaactggcttgtttgtaagtggcgaaaaggaccagccataacacacagttctgattctggtgcacaccactgtctgtgaaccacagattatagggagggaaccgagaggcccaggagccttgcccacaaggctgatgcagaattgtggagtttccaacaggtgacttgtgctccatgtggctcattttcaataggcctttaagaattttctttcagactcttctctgtttcagtatctctcaacccctttaattacgaagttcttttcatctttaactttaattcttccttatgtatgttctcatcagtcactgccagtctctggtaaatctgcatatcacagagatcagcctggggctgatatagctcctaagtatagcctgtaaatggaactggagtttaggctccttattaccatagaaattaaaaaactcttccattcacgtgtagtttgggttcttagacagggtccgctaaacccgccagctcttagtgggctgtagaggctttgtgcttgccccatgctgagctggaaccatgctctgaagggcatcagatgctaccagctccctcttctctgagcattgcgtgtcgagttgcaccatgctgctgtgcaaacatggatgggctgactgcccttcctttcaattcagttaataaattcagtgggagtgagttcagttcctgagatgtgctagagatgagaaaggatgtggcagaagaagtacctatctcttgagggatgaagtggcctcatttcacctactgagagtcaggaagtgccccatctgcagcctctgggctggttggggtcagtctgcagattttccttgctttctcccatgcccttgtctttctctcccctgtagagaaagacactgatgttgctgttgttctaggaacagtggggacaactgttaggttagttaaaaacaaaaacaaaaaacactgaagaatcaactcccttcaagcatgggctagatgctgaagataacatactgcccctatccccagagacccttgctcccagcgacccttggtgtctgggagagagaccttgggcatctggagacctggtttcaagtcctgactcctgtcttactggcaatatgattttggacaataaaagccatatcaataacaataataagtacttctgttttggagtgctaactatgtgtcaggcagaatgttaggtgacttcccacattacctatttgagtaaacttatcttttcaactttcagtttccttgtactaaacagactttgtcagcctagctcttcctccaacacaatccccaaccgcatacccctgtggacatggtccactgatctaagaatggatttctgagcaaagatggaccaatagttcttcaccctagactttgggggcaggactgagttgtgttgggagagagagaaggagaatgtgtatccatgagtgtctggatgtgcagattgttacatataaaactcaggagcagctgaaaggcaaaagaagccaatccacataggagaaacaaataaagctgattggcagaatggtgaagacaaaagaagggctcagggtcctgagggctcctcaggctcaggcttcagtgtgctctggggacccagctccttgcctgttcttgggctctgtgggacagcctatgtcctagcaaaatctttcctccttagctggagctagtaggaattaggtttctagtcactgtgataaaaatcctaaacacatttcttttgtgaaaagtggggaagttgcacaatagcagtcccatggaggacacatgcccagagcaggtcacctgacgtggcaagaagatcatggcaatgttgggaagactttgttgaaccagaacaccccaaccataagctctgctaatttaactgttggcagcagagttctgctttaggctgataggagcaaaagcccattgaactcagtagcatcaggccagaaagtggctgagaggtcttggctgacatctctgacacctctgatggatatcagccctgcttgatctccagtgcccttcaggggagagggtgggaggcgtttgtcatcacaatgtgacttgcatgtctaactgctagttctatacatgtctggtctaggaaaaacactcccagttctccaaacatgggatgtgtctttgcagactgcagactctcccatcattagaggcaccctgggactggaggttcttttgggcatgtgtggagtgatctttttctcccattcaatagatttaactcttctcttttctttcctttgtcttctctttccccatgattacatgagacaatatgtatgaagaaatactatgcaaatacattaacttacccatcatttgtttatttgacaaatgtttgttgactatgtgccagacactgtattaggatttatcaacacagttgtaaaagagaaagatgtgattcttggtatcatggaacatgcattcaaagggtagaaggagacaaaaacactaagtagaaaagtaaaagcaaaaattgtatgttgtggtgagtgctgtaaaggaaataagcaagtgacagaaagagaaagggcctacttaggaaggccaggagtactgctctgccaagactcaaaagagaggaggaagctgaccattcaaaagaagagtatttcagacatgagaagtggtttgggcaaagacccgaggcaggataaactggctgtgttcaagacagggaatagactgctgtgactgccctgtgacaagtaaagggaggggtatgtgtacgtagccagggacaagagcacagaccctggagtcagacagttctggattgaatcccagctctgcccaggtactagctggatgatctcagacaagcaggtaaccactctgtgcctcagttttctagtctgaaaaatggggacaatagtacttatattttgggttatcataattatgaaataagataaagcattatgttagtccaaatcctctgagaagcaggtgtcaagataggattagatgcacgacaggctgttgggagaaatgtcttgagggataaaagaggagaagccagaaaatgtgggaaagccttcagacctcaatgcaggtctgacttatgaaagagtaggggaaggttaataatactgcaatcaacatgggagtgcagatatctctttgacgtactgatttcgtttcccttgagtaaatgcccagtagtaggattgctggatcatatggtagatctatttttatatttttgaggaacccccatactaatttccataaatggctgtactaatctatattcttaccaacagtgtaagggtttcctttccttcacatcctcagcaacacttgttatttatttatttattttttgataatagccattcaaacaggcatggggtgatatctcattgtggttttagtttgtgtttccctgacggttagtggatgtgagcatttaaaaaaaaatattcttattggccatttgtatatcttcttttgagaaataccttttcaggtcatttgctcatttttaaattgggtcattttcttactattaagttgtttgagtactttatacgttttggacattaaccactttatacatgtatggtttgcaagtattttctctcaatccacaggctgtctcttcactgtgttgattgtttctttcactgtgtagaagcagcttaactttttatttgatgccatctcttttgtctgtttttgcttttgttgcccatgctttggaagttatatccaagaaaacattgcccaaatgaatgtcaaaaagcttttcctctatgttttcttcttgtggttttacagtttcaggtcttacatttaagtcattaatccatttcaagttgatttttgtatatggggcgagataaagatccaatttattcttctgcgtatggatacccagttttcccaatgctctttcttagacagactatccttttcctcattgtatgttcttggtacctttgtcaaagatcaattaactggaaatgtgtggatttatttctgggctctcttgctgttccattgctctatacatctgtttttgtgccagtatgatgttttgattactaaagcttagtagtgcattttaaaatcaggtagtgtgatgcccccagtttttttttttctcaagattgctttggctattctgggtcttttctggttctatatgaattttaggattgctttctctatgtctgtgaaaaaatgtcattggaattttgataggggttgcattgaatctgtagatcactttgggtagtacagacattttaagaagacattcttctaatccatgaatacaggatattttaaaatttatttgtgttttatttaatttctttcatcaatgttttataattttcagtgttcagatctttcacatttttggttaaatttatttgtaggttttttaatgctatcataatagggactttttcagatagttcattattagtatatagaaatgctcctgaattttgtatgatgatttcatatgatgaaactttattgaatttgtttattatttctaacagttcgttggtggaatctttagggttttcatatgtcagatgatgtcatctgcaacagtgtcaatttaacttatttttttcctgttcagaccctttcccttccctttctttcacttcccttgcctttctgtttttgcctaaatgctctggctaggacttccagtactacattgaatagaaatggtcagagtaggcatcttgtcttgttcctgatcttaaaggaaaaacgttcaacttttcaccattgagtatgatattggctatgggcttgttataaatagcttttattgtgttgaggtacattccttctataatttgctgaggatttttatcattaaaggatgttgaattttgtcagttgtggattttgcatttattgatataatcgtatgatttttgtcctttattcttttaatgtggtgtatcatattgattgatttgtgtattttgagccatccttgcatccgagggattaatcccacttgatcgtggtgaatgatcttttaatatgccattgaattcattttgctagtattttgttgaggatttttgcatctgtgttcaaggatattggcttgcaattttcttttcttgtagtatccttgtctggcttcagtatcagggtaattttgcctcataaagtgagtttggaagtattccttcctcttcaatttatttggaagagtttgaaaaggattagtataagctcttctttaaatgcttggtagaattcaaccatgaaaccctcaactcctgggcttttctttgatgggagatttttgattactgattcaatctttttactcattattaatctgttaagattttcaatttctttatcattcagtcttggtatgttgtatatttctaggaatttatccatttttcctagattattcaatttgttgctgtatgattgttgatagtaatctgttatgatcttttgtatttctgtggtattaattgtaattctcctctttcattttttattttatttgagtcttctcttttttcatagtaaagatctgttgattctgtttacctttttaaaataccaactcttagtttcattgatcttttctattgtttttcaagtatctgtttcatttatttctgttctgatatttgttattttcttccttctgctaacttcgggcttagtttgttcttctatttttagctccttgagatctgatgttagtttatttgagtgcttcctccttctccttaccctcctccttctttttgaggcaaggtcttgtgctgtcgctcaggctggagtgcaatggtacaattacaactcactgcagccttgacctcgtgggctcgagtgatcatcccaccgcagccccctgagtagctgggactacaggcacatgccaccatacccaaccactttttttatttttttgtagagatagggtcttactatgttgcccaggttggtctcgaactcctgggctcaagcaatccacctgccttggcctcccaaattactttcttcttttttaatgtagatatgtattgctataaacttaccttttataatcgcctttgctgcatctcataagttttggtatgttgtgttttaaattttgtctcaagatatttttaaatttcccttttgatttctctttgactcattggttgttcaggagcatgttgtgcatatttatgagttttctgaaatctctcctattattgatctctagtttcataccattgtggtcaaaaaagatacttgatgtgatttcagtcttcttaagtttgttaagacttgttttgtggcatagcatatgatctatcctggagaatgttttgtgtgcacttgagaagaatgtgtattctgctgctgttaggtggaatattctgtgtatgtctgttagatccatttggtctaaagtcttagtttgtgtccagtgtttccttattgattttctgcctgtgtaatccaagaaatcttgataattgctattggtatcttgtttttgttttcctaatttcttttctgtttttttttttttttctccctttccttaactaatccttagttagctacaggacctcaggacattacccatcctcatagttgagcaagagacttcctaacaagagctaacgtaggcagttgccatatggtaggatttgagaggtaccacaaaaattgccctttcttaaacaaacaaaccaataatcccatacctgtgatactaccagaagttccatcgttaagaatttcttcccctgggataagcctcagaccacagcttccaaggggaacattttaaggccctagccatgtaggtctttgtgtgtcttatttggaagcactcaatgttgcttaaccctaccctcttgaaattctccccttccctctcatgggccactgctgttctgattcttgtttcaaccttcctccctttccttttgtccatgtctgtattctttgctgactcctttctcccatcctttgggaaccccaaggctctactaacaccctttcccttataaatctactatgacttcaaccaggaacatgattgtcaatcaatatgtcaaattttcacatcttccgagcctcatagcacatctctcaactttgctttggtcatttcctcctagaagaagtctttccagtaactcagtccctatgtgaccaaaccgtcttctcctcccctgacatccttcctctgggtttcctgttcacgcaggctggaaatctatgacacatgtgtgatgttttccctctttcccctccaattccaatcactcctgattttttctatttattttttttcacaagcgaccccctttctctgccattaccttcactcaggttttcttcttccacctgcggttttgccgtggcccactcactatacttctcattgcctcccctgatccctccattttttggaactgtctgttgaatatttaatacatatgggtgaagtctaagtagttttgaaagttcttgagcatggtttgttctcagcagttttggcatcccatagttttctttacacgtgccacttgtgcctgagtctggcttcaagggagagcggaggacagcttcagctgtaagcctctctttcatgcctggcctgactcccatcccagacctgacctcctgctgaacaactgctgcctgagccttaccttgcagacacagcaacttcttgccactagtgtcacctagagagggttcctatccccagtacataacccttccagtgggacaaatccaattcctagccccagcccctcgtattttatcctgccccacccactcaagttgttaaatcaaagtggccgtttcctgagaatgtctggaagatcaactgggtcagaacttttgtttttgtttgtttgtttgtttgttttttgagacagagtcttgctctgttgctcaggctggagtgcagtgatgtaatcctggctcactgcaacctccacctcctcggttcaagcaattctcctgcctcagcctcctgagtagctgggactacaggcacgtgtgcctggctaatttttgtatttttagtagataccaggtttcaccatgttggccaggctggtctcgaattcctgacctcaggtgatctgcccgcctcagcctcccaaagtgctgggattacaggcatgaaccacagcacctgaccttgtttttgtttttgagatggagtcttgctctgtcgcccaggctggagtgcagtgaggcaatcttggctcactgcatcctccaccttctgggttcaagcaagtctcctgcctcagcctctggcatagctgggactacaggtgtgcgccaccacgagcggctaatttttttttttttttgtatttttagtagagacggagtttcgccacgttggtcagtctggtcttgaactcctgacctcagatgatcctcttgatttgacctcccaaagtgctgggattatagacatgagccaccgcacccggcctcagaccttttgtccatgtaacctcctgtcagagcataggagatgctgtgcgagaggggggtggttccacttttgtgtctcagttatcaccctaagggatgttcctcatgcttaattatgtgctattattcatataatgttagagtgcctacggttccatttatgtaacattattaaaatgacaagattatagaagtggagattagtggttactgggtgttagggattaaggcaggaagaaggtaggtgtggttatacaggggcaacaggagggattcttgtggtgacggaactgttctgaatcctgactgtggtgatggatacagaaactaatgcgtgtgataaaattgcatagaactaagcataccacatgcatacacacacacacacatgcacacacacatacacaccaatgcaagtaaaactaggggaatctgaataaggttgttggattgtatcaatgtcagtatcctggttatgctattgcactaaagttacgaagatgttaccattggcagaaactgagtaaaacggacaccacaggatcactctgctatttctcacaactgcatgtgagtctacacttgcctcaagataaaaagtttaacaaaagaactagcacttctagccctaacacttgcctagtggtatttgttgaactgaactgttcattctttcagccagttctatctcttgggaataatagatttcatgggacttttgttcatttaacgagagtatgtttctactcactctccagaatgtactgctagcttcagcttctccagcttcctctttattcttacatgcatgattttgttgacatcggtcataccacccttcatgctcttgcctatggactagagaatcccactaactttagtccagcctcaatgctcctttgattgtttaaactgctcttctcccgcccgtcacctgtgcccatgggatcagagccacattcagccttagccaagggtgactacactattatatgccacagtcaaagctggatcatctcattggtttgtattttcccttttttttctttccaacatttttggccactgaaacatattaactggaatcccctggggtccagtctgggaaagactcccagatgaattccctgagttttaattgagaactcagctctctgaatcttttaagttgcagaactatcctctacttttctacctttctctgcccattcacatagtcttgtaggatcttaagattccttcccatcaacctcccaattttatactaaaaaaacttagtgtcacctgccaaatctgaaagtgtactgcacatttcatgatctaggttatttataaacaaggtgcataaattcgagcccagttctaactccacagacatgcacattcgcctcctccggatgtttcctgcctttaggccagagtcctatatttgctaaatcccacccccgtggtcctgtacacgacacacacacttacacacagacaactaaggacacttggctaaaaggtacaactgagaacggtgcctattacagaatcctattacagaatcctagaggcgggagaaactgcgaggtcatccaattcagcgccctgtctaactcaggaacttcatttgttagggattctttcttagcatgagtccacagttgtttgtcctctggaaggacacaggatccgtttcttttctccttcacccatgttgcttctccactaattgaaactctgtttcctgggtgatgcacccactcatcccttcagtcattttgtgcacatcgtaggcagacagaggatggcaccacttgacccacttctggtctaagaggaggtaggatttggtgaaagcagcctgttggtggagttacatagacctgggttccaatatctattcctgcacctcctaactgcacaacctcgagcaaattactaactcagcctcagacttattttcctcatatgtaaaacttgtctcaaaggttgaagtgagaaatgactgaggtcgtgtttgtaaaatacctggtacacattagctgctttcactatgatagcttatattacaggtagtagttcgggtaattttactgaacacttactttgtgctgatactacatcaggcacttcccatgcagtaatcatttttattcttcacaatgactctaaaataaagatgctgttattatttctcactttacagatgagagagctagggccctgttaagtcatttgtccgaggccacaaaactgtaaagcaagagagctaaaattcaaccccaagttttttctgaaacttagagttatgagtcgtctgacaactctgtgtcattttttttacttcctccctcagagaacctcaatacattaatcaggcagtcacctcacatctttcttaagaagagacaacgtatcagtacacagaatatgcatatttcatctgcaaggcatcatagtactgctcgctctatgtttatgtaattatcatgaattttaaattaatgtcatctgaattaatgaggtcacacattaaagaaacaaaacgtgatctttaggatacttctggctttaaaatttgatgattctatagacatagcaaattatagggaaataaacaactaaataattgaagaaatgggaagactacacgtggctggttttgaccaagattttcaggattttcagaacctgaaagccatgggcttatggagacaaaatgggcaaggtctccgtctgtccaaccttctctgaccttgtggctctaacacaagaaccgggacatagaaattcctgtgttcacttctttgagggaggcacagagacttttgtcagtgtgttgattcctattaattaatttttaggaactcttctgttaatttttcccaaagttcaagggtataatccttgaatgttgaccaattaattaaaggttatgtataggcctattaatcaaggttctcatctttacattttcatatccccaggggtgtgaggtagtgatctcttggtagaaggaagaaggggctaactgttcctgtgtcacccccaagaaatgagcatggcactgcataaagagatgagttacttgtgcatcagggtggcagccctgtacagtgggaatagcatgggcccaagattcattctgactcagatgtaagtctcttaacctaagagccttggtgtatccaactatagaaaggaaaaaataataataatattgccatagggaggctgtgaagattaaatgagataatgtatgtgaaatgccagggtgctagcttgttcctttatggcttcattcaataaatattgattgagtccttctgtatgccaggtccatgccatgcaccagaattacaattggtgacattgtaagacagacatcgtccctgccctcatgtagcacacagtctaatggaaaaggcagaccagaaaaaagtcacagatacaattctgtattgtgcacttaaaatttgtcaagagggtaaatttcaagaaaaagaaagagagggtagatctcatgttaagtgctcttaccgcaataaaataaagacataaataaatgagctagtatatttaactacaaaagaaagtatgcacgcacatcaatgaatttatattggtaaagtatttagaacattgctggttacagaggaagtgctatggaagtatatttttaataaaaaatatattcaatcattagggctttattataaggccataattatgggatgtggaaagatttaattgcaaagatccttcaccccaggatggttaatagaaagttggaaacaaccttaaagtccaacagtggatgatgaactacattagtgcattttgtgttgctgcaaagaaagacccaaggctgggtaactggtaaataaaagtttattttggcttatagttttgcagactgtacaggaagcagggtgtcagcatctgcttctggtgaggcctcaggaagcctcagcctacaatcatggtagaaggcaaagggggagccagcatatcatgtggtaaaagagggagctcttaagagagagagagggggaggttccaggctcctttaaacaaccagctcttgtgtgaactaacagtgagacacgagggattcaccttcataaccaaaacacttcccagcaggccccatctccagcattggggatcacatttcaacatgagatttggaggggacaaacatccaaatgatatcattgcctaaataaattatattaatccatatacaaatagaatacagggaacgttaacgtagctagtgtgatagcgaaggcctccttgaggaggtgacaacatgatcaatgacgtgcgagaaagacccatcctgtgcagggtggaggaggacaggataagaaagaacattccggccgggtgcggtggctcaaacccataatcccagctactcgggaggctgaggcagaagaatcacttgaatccaggaggtgaaggttgtagcgagcccagatcgtgccactgcactccagcctgggtgacagagtgagactctgtctcaggaaaaaaaaaaagaaaagaaaagaaagaaaactttcttgtcagagggaacagtaaatcccaaagccaggaggtggggagggacgtggcaaatctgaatgaagaatgaacccccaagtgaagagagaagaggagggagggagaggagaggagggagaggtatgggaggctggggagcccagcaagggctgaccctgcaaagtctcctgggccatctgagtgacgttagattttattgcaagtgcaacagaaagtctttgatgaggtttgagttggcagatggcatgatctgaattaagtgttaagaagactgcatggagagtggtaggtagggagagcagaggtgggaggcaggaaggaagctggttgagaggctgccgtagaagaccagatgagcaatgaaggtggcggaactgggtggtagaagtggggagagcaaggtgtggggggcctgggatcttgtctggaggtggcatgaacagacttgctgagagattggatgtccagtctgtccaggtgagagaaggtgaagaactaaggatgcaaagcctggattttggttgagtaactggaaaaatcaaggtgtcatttactaaaatgggtaagactggtgtggggagagaaacacagggttaggctttgggcatgttgcatttgagatgtctgtgaaatatccaaatggcaagatcaaacaggctgtgcagaagctggggagtggagagataaaaataaaagttgtcaaccatattgatgatgtttaaagcctaaatcaataaggctgctttcgattcccatatattaataataacagcaactgctagtttatgagttttctctgtcttattctttggttatagctgttatcttagtcattttgggttgctataacaaaataccatagactgtgtaccctaaacaaccacatctatttctcacagtcctggatactgagaagtccaaaaccaaggtgttgactgatacagtgtccaccagtgatggctgcttcctacttagcagatggctgtcttctggttgtatcttcacatggtagagagcagagagagagagagagagagagagagagagagagagagaaagctctggtcttttcatccctttctaagggcactaatcccattcatgagggctccaccctgatgacctaatcacctcccaaaggtctcacttccaaataccatcacactggggatttaggcttcagcatataaattttgggggtacacaaacattcggtccataggagttgtcaggcatacccattagattgtgtaccatcaggagtagttgtaactaagtgacctaggagagggggaataggtgtggaggaaggttccagaactgttggaatcctctgctgggcaggctgcttatccaattccaaccactgcagctgggattgagagatctgtctcatggcatggaggggcccttccccacacctttgaaagtatagtcagcaactgtcttacttgtaggtctggctggtgtggcccatcttggtaggtaatggtgagtggggctgctagtctgttttttgagtctgaaggggttaaggagggccacacagatttcattgcagaacagatggctcacagcctctgcacttatacctcccattgtctgctgtctgattgtcacctgggggaaggctgccatgccatgaaaatgtaagaagttgcaagctttattagtccatcaccaccttacctaccttagcatagcctcttccaaggaaacaaactctgtgccacaggtcattggataaacgctacataggggcttcgtttcttattcctgtgctggcatctaagggaacggaagagaaaaatcgatgagtttttgttccgttctctatcttcccctgcaggcagatatggccagaacagagtaataatatgaagaaacttttctttggctgcacataagaaaatacaggttctacctctcattctactacttactgctgctgaccttcttttggccagtcccttggacattctgcatcttggctggtccatctgtaaagaaggagcagtctatgcctgctctaccctctcccagagctgttttaagcagcaaaagagaccacaggtgtgaaggtgctttggtaacaacagagtcgtagaaatggggatttgtttgcatgtattccgccaggcccctgttctcatggaagtgtgtctggtgaggaagatgaataaggcgagctgcttggtctagacagtggtccttaaagtgtggttcccagaccagcagcagcaatacttgggagctggacagaaacacagacttccaggccccaccctagacttactgagcccaaaagccctccaggagtgcctgattcctacctaagcttgagaacaactggtctaggcattcaggaaagcacttcctgagaaaatgactttaataaaatctgagaaataatcagctcttagacagaccaagaggaagggaatgcgagattcagaacaccatcccagaggaaggtcttggcgcaagagacagcttcatctttttgagaaattgaaatgagtccagtgtggtaggagccaaggaagagcaagtgtagaaggcaatgaaaggaagcagccagctgtgaggggccttgtaaaccggggaaaagattttgcagtttatgctctggtcaattgaaagccattaaggggtttggagcagagaagggccttttctgtcaataacatgctattgtaattttaaaacatttccttacaatccaataagggcagttaattgtcttaattagagcttacactctaattcgggagaaggcacaatgcaactattggggaagtctttgaatatatatattaaacacaaattatgtgtttggcactgtgctaggcactatgaaggaggcagaaagttacgcaactcctttcaggggattgagaagctgggtgagaggacaagacaaaggcgcacacaccggcaccggtgaagggtgccaggcatctccaggttaagtcccccgggggcagggctggttgtggcagtggcttagagggtgggtagctaaagaagtgttggggcagccagaccaggcttcctggacgaggaaagggcttgggagaaagcacaggggcagagatgagcaaaggatttctctgtattcccggggaacagttcccttgggaagtactacaaaatacactgggaggcacagctgagaccagatggtacaaccaagtctagggagaggaaacacccccgagcctggctgcatagaccccagactatcttgaccccaaatgaagctatccttgaggttgtggccaaggtcccttttgggaggcctcatgcaagggattgaggcctttttctgcagttgccaatgagaattccctgttcagtctctttatcaggctctggggcatccctgagagttgctggctttgcccttgtttttaaacctttttatagaagtataacaatcatagaaaaaattacataaaccttaagtgcatagcacaaagaatttttttcaaatgaacacacctatgttccccctgcctccccacatcatgatcaagaaacaggacattcccagcacccggaagtgcccccgcctctgccattcctcatctggcactgccctccctgcagggaaccagtcccgacttctaacttgctgctttttgtcttctatgggctctttggtttctagcttcccagcgtgatgtttgtgagctatgtccacagtgttgcctgtagttgtagattgattcatcctcattgctgtgtgatattccatcaggtgacgtgtatacactgccattgatttgtcttgttctactgtcaatgggcattttggtagtttgcagtttggggctatcattttgttgcattttaaactttgacctgggtcttccttttcagtttgctcagattccccttattgtcactaatttcctctcctctaaaactgttgtactctgttgtatgtgtgtttgacaatggaaacaaataaaaaaagaatactaaatgaaaaattggcaccacgagattggagggatgaggggggagggcactaccagagagccacctctctcctccctcctcccctctcctctccccttcttcccctgcttcctccccactcctcttcttcctcagagggcctaagctaagggacaccactgcaaccaggtgctgacagccaggtaccagcaaaactggccaaggtagattgccctccagagcctgtgaagggcaggaaatgtatcttgttcatttttaaagatggcttggtgtggacacttggtaaatgtttcttgaatgaatgagtttctgatataataaagtgtctgtgtttcctgttaatctatgaggtgccacgtaggccctgagaatacagtggggtgtgacatcctccccttgaggatcttctgaaacacatttggccgagcacttaggccaacatcaggcaccatctcagcatgttccgcctcctgcctcctgtaattctgccacagctctgtgggtagtccctcttcttaccacatgcacaggtggggaagttgaggcacagctgcctgagtggtgtcccaggtttatacagttagtcaggggacattcaaagccaggggtgggcttgaatttgtgctctaactgccactgtgacacttgaatactgccaagtgagcatagctaaacagaagggacagcagacagtgagcggtccccagagcagctggtggggaagcccagcttttctgaggaggaggggcccgagtggggccctcaggaaggtgatgcttagagaggtgggaagagcaggcgggtcctgtgagatggggggcagctcgaggacgctcctggtgtgcatggagatgtgtaagtcagaaggtcagggacactgccaagggcaggtgagactatggggaggggagaggtgtctctgggctgtcctgggaacacaaaccctaggagtacattgtggccaatcagtccacgtagagctgcctgaatcaatatttcgcactctagaatctgcagctttgctgctgttggggtccctcgtggccgcatctctgcagtcctgacttgtgcattctatgtgagctcaactttcctccccagccggtctcctaagtcagcttctgccaacagcccgcaggatatgtgctcaagaccttcacctagccttcagagcgacatagcccccacctcaccctcctggcacccattccagaatttagccacaggaagctcagagctgagacctgctggaagcctctccctttccacaaaccagagagcctacccctctttccatcctgggtaaccctcaacaatacacaaattcattaacatttattaaggttttacaggctaggtattaaaacactatgcgaaaagccctgcaggctagcagaaacactttagaattctctacttatccagcagtttggtaattaccttgaaggtggtatggttagaaagcacatatctgcatacacatgttcatttccttccttcctttaagtctagctcagtggttctcaaacttgctagtttaaaaaaaaaaaaaaagccttcctgaacaaggtggtcagcatgaaacatgcaggctgcatgttctgggggaatttaagggattttcaaggatagttttgaatctatgcaattcaaaatatcaatttttgcctttcgcactgacatcagaattgaagtcccactgtactgcttaggtggttgggaagaaaagcctccccacttcctcctcccagaggcactaagacctattcacacccgctgcccctgatcccccagggaccctggcagctgcgtaccgagcctcaccagcagccaagagagcactttttggatacttggaaatccctgccacttatggggggatttaagtccagctggctccctagctgggcctattttttggagccagaagtttgtctcgccactagacaatgagcgtatcaaagctgagactctttcccatctctgcttctccttcttacacctcccccaccctcatcctcctctccttcctcctttgcttcatcttccctctccttcttgtcctcttcctacgctctctcatttctcttctcctttctctctttttttaccccttcccctgccaatgttttcatcattgagcacagtgcctgtcatggaacaccattctataaagtttataaacgaatgaatgaatgaatgaatgccattctttggcttcagaggaaaatccacctattttcccgttcttttttcaatctagggctcttggaactagattgtcatgttcacctttctgtctttttcattattccctgaaagcacaaactcaatttaggctttagtgaaaaatgaagagcattagaccaaccttttaaaattgcttggtcagtacttcctgcttgtctgtacttcacaacgctgtcatcacggggtaattataacattaagtatgtacctgatcagcaagttgcttttattaaaatcccctgttggtttctaggcatctcatagctcctggggcatttgttcaactccttgggcctcaggcagtttcatctccagtgcagataggagcccaggtccagaggtcctgggtcaacacgtccctaccaccaccctattccccgactttcctgatagtacttttgccaactgtgtggtgagcagctcattatggtcacctctagaagaaggggctgcctattcatagatgagaataccgaggtatcgtggagggaagggaggagcccctgggaacacggcttctcttggcaatccctaaaccacatccaacccacagtgagattcctctctgtgtttttgctggtggaggccacctggacctcctttcacgtttccctgcaggggtgatggcaactgtggcagggccattttttactttacaagctcctttttacgtgtgtttacaaattctatagctcagcaagattctagttctggagtcagacagatctgcttataggtgcgggccaaataacctgactgttctgagctgtgttttctctgctgtaaaatgggaataataatagaacctatctcatagaatctctggtgagcatcaaaagatgtatgtaaaaggcttcacatagatcctggcacatggtaaacactcaacaagtgtggctaatatgataatagtagtgctacttagcagttatccagtaaggaagttgccagacttttgacaatctctggaggaggatggtattgctttcttgcagtttgaaaaatctttcaatgcccgggggaggaggtggactttggtacagcactgaccagagtctctaccaccaagtagactcctctgctttataaaagttataagcaagaactcattgagagcattcattcactcaagaaatgtttacatgcctgctgcgtgccaggctctagacaaggatcatcctagacaaggtcttgttctcatggagctaatattcttgaaaggaagacagacaataagtgtgtaaataaatggacaaggcaattttatatagtgatgagtattgtgaagaaaataaaacggggttctaggacagtaggaaatttggggaggggtgctgttgagttccagtggttaataaaggagccagtcagcgtgaactggctatgcggtcaggtgggggggcaagtgccaagggccagatcctagaaccagatcctagaaccagcgtggtgtgttcaagaaacagacaggagttcagggtaactggcctgggagaggccaattccaggtgagatcagagagattggcagggccagattatgagagcctgctgatcacagaacatcacactcccaagcccaaaaccagatttcttttttataaccatgggccagatgtatgggccacactatagcactatatgatatagaccagaccactggaaaaggcttccttcatgaggcaggatttagtatgaaccttggatgggaaataaagttgtgcattgtgctacagagaaccctggcatgaactggagcacagacactttttaagagtgctgtggagagtcacagttcccagaatctgtcttggagcaccagcacccaagaggtgctcctcaaccaaaggtttctgggagtcttccaaaagtttggggaaatggtaaactagattttattctccaaggttaaaaaatgtgtccgggcacagtggctcacacctgtcatcctagtacttttggaggctgaggcaggtggatcacctgaggtcaggagtttgaaaccagcctggccaacatggtgaaatcctgtctctactaaaaatacaaaattggccggtcatgatggcacatgcccgtactcccagctacttgggaggctgaggcaggagaatcgcttgaacctggggggtggaggttgcagtgagctgagatagtgccattgcactccagcatgggtgacacgagcaaaactctgtctcaaaaaaaaaaatgtcgttaaaggttgaggaagccttgcagcaaagacacctgtctcaccttttgtaatccaacatgtcccaagcttacttaaccgtgaaaccttatttatttacagagtccctattaacatcccccagaattaaagtgccagggaacaccctttgggaatcactgttgaagaagaagccagggtttgtgtgagcctgagggatcagtagcatctgtgattcagcacttgtgcccgtgataattcatggtgatgatcccctccagtgactcaaatcattgagtgtcaactgtgcctatgttagccctgatccacttgctttattttcattttgctagcaggacaagggagtgcctggagacaggaaatgagtaaactcacatccataaccccctgggactgggctgagactgggttggttatgaaaatgctcttgggccttagacgacagccccggaacccccagtgataagcttctcaaagagttgaggtccacagcctgtgaggagcctttctgtaggatgagcagtgtgtgtactgtgtgtgtgtgcctctgtgtgtgtgtgtgtgtgtgtgtgtgtgtgcaggggggttatcagggtgaaggtgattgcattctcagctcatctctgctgctagcaacatcaaacacatacttttaaacttttggctctaatttccctgctgatgacagtaaaccttagtttgtcagtcacttggatggatctgggttggttttcggctcatgaatcgtagaaatggaagtgacgtagtaagaaatcatccagtctccagtctcctcccctaagaaccaggacaatggttctaaccttcagaagattgtgaactcctttgggaatctaataacagctatggacctaaccccagagaaaaagcacaaatggagattcaagtaacatttcacctactatatcagaggtttacaggcctttttatgtccttggtaccccttatgtgtgatatggttaataactgttccttgaatacctatttaaatcctgttgttcattgtctcaccttgctcttaggataaggtaaaatattccctaaaatggcacacgaggtacatgatctgcacctgctccccactggccccggggggcactgctcattctctctgcccccatctgctgctggtctagccacgcaacagcacctctgagagttcttgctcttacccacccctgctttccacaaggcatatgcatgcgttgttttctttccctaaaatgtcttttttcctttgttgtccagacaactccttcttatccttcagatagcagttccggggtgacttcctcaaggaaatttccttcacctccttttccagaacttatacaacagatcatccattctatgccctttaccaagtcctatatgtcagattatccatcctgtattctcatagcactgtagacgtttctttcaaaagcgtatgtcacagttgaaatttacctctgtttttgagattaattaattaaggcctggcttcccccactagacagcaagtttcatgagggcaggtgctggatctttggtgcctaataatgtgctcagcatacagtaagtgctcagtagtaacttcgcgtagggtgagagtatgatcattgattatgaatgctccctatatatcaaagcaacccattccatggtcccagagattttgttctgttaacttctggttttgaaaagtgacaattttttgcttgcatccattttactgacaaattatgggaggttttgtcctttaagtaaatcaatgaccactttggtctttgcaaagctgttggccagggttctacaatagaaatccccttcaatgaattcagcgtcaggcagaacttggacatcactctgcccaccctcaggctgcaggagtatatgataaccatatccatcagcagccatccatatgatcacatttacatttctgtcctttcataattcctgccatcattcctgcctccctttcttcttttcttcctccttccttcttttcttccagcagttgcacaggtaccctcgcaacctaagtagagaatgtgacacacacgcacaccatacacacacaccacacacacaactcttggaggaaattttatgtgtatatgtgtgccccgtatgtgggagtaggtgtaaagtagggcaaaatttcactaccaataattctgattcatagttgaaattgactctgcatggtagtggggcaccgagaccccttctagctggtgggtcttttcccctcatccccattgatattcccctcctctccatgaacacaacctaatattggtattactgaagtctcaagccccaatatttttcttacccaatcacccttacctgctcactctgcccctgccatttggtccagctgcgttctggggacttcatacagtggggagaacctcacctcacaaggatgagaagctgtgggcattccctgttctcatttcctctgtcctttatgctagagcatttgctccaacctccacttcctttcagtatcctgccacagaaacatccgaggaagatgggaagcctatagtttcccacctgcaactcatttccccacctgcaagagaggaatgttggtggaaccaggtgctggaatggatgtttgcgcagccccaggagctcagtacacactactgttgttaggtctacacagtccaatgcaggcacatgacaaagctgctctgatagaaatgagccctgcctgctcagtcctttcttactatcctccatctccatgtggtccagtcccagcctgtggtccatgctatgggtcctggaggtaatcagctgtcactaaattgagaactgtccagagtcttcactgccccttaaccataactaacctgggaacttgagtgtttatccttggagagtgaagtggtaactgtgtggggtagttggtgagaaagttcattgtcaagtgggaagaagaacagacatgtgggatatagctgtgtgccctggtaaagcctgagaatgatggtcagtacagcccaagaacacccccagattcagattcttcgtccagttcttgctttttctgaagtgtgacggtggggcttttcttgtattccttccaataaatcccttgttacttgaagtcactcaaacaaatatctgttcgttgcaaccatgagaatctagccagaacctctcctcgggtctttcatagatataatatatattttttcttttttaggatggtcatagatgtatctgccatatttaacctatcacactacaggcttcttaaggcaggctctccttcaaagtcaactttctagcttctgatgaaaattggtttgaaaaaagagaaggagggaaggaaggaggggggaggatggagaaaaagagggagggagagaaggaaggagaggaagaaggtagaaaagaggagtgaagaggaggatggaggaaggaaaggagaagggaacgttagttttcaggagggacctgcatagcctatacgtcattacactgtgtaccatggctggggtaagagtggaggatgaggtaggtcaaaggcataagggtcaaggaacagttattggctaagttttccatgaagaagggtcagataaggccttgattcagaacagagagttttgtttttggataaactagtttcgatgggtatttttggaagatgaagaaatggaagtttatttcattgtcaattctgcccgtttcaatttggcaaacagatttcttcactcccctttgtgtttcagacagcactaaggctcttgttcattgtaactccccaggactcacggagcgcagcccccagcagaggctgcctgctattacccagaaggccaatagagggctcccaagaacactgagcaaaatttggtggaagacatcaagatgttcaactgtaatggcagtactggttattatccttctctaacatacaaactgataagactgtattcatatgataaaggtgcaaatggaagagcacctgccatgaatgcaatagaagcagttgctgcattaaggaaacttggattagattagctttaagtttctttctgaacacaagccagtgtcttgaccggaagtatctcttctagaattagctgatgatagagctttataaaacacttgcatgttggatatgttcaagacttgattctgttcactatgttatcttggaaaaaattgcttaatatctctaggcattattttgtcttttttttaaatgatgggggtaatgttagggtagtgggagtttggctttttaagaccttttaaggtaaaatcttctgttactataactgatagaaaccacattcagaaaaatctggccgaatatgatttattcaaagggagaagagttaatcctatcccctaacacaaggctaacaaaatgattcttagagtaatacttggagcggtgactgcagtgtttgatggccattgagttaagacagtatagtgagggtgaaaagataacagtagccgtatctaaaagacttagattgaaatcttgactttatttaatagcaaatcacttcaccaagtctcagttttcttaaatctgtaaaattgggataatccaaattgccttgtctactccaaagtgtgaaggtcagataagataatgcaatagaagtattttgcatactacaatgtgccatgtaaatgttcagttattaatagatgcaataacttaatgtttcaaattttagtgacacagtatgtgtgaaagtctgaaattctttctttcccgaattcaagatctcatatagccatactgcagccatagtttttctttgtaatctttcaacagaaaacacatttgaaaagagacatagaaagatttctgagatgcaaagggaaaggaattagattcatagattttagaacagaaaggaattcaagaaactaagcaaaaccagatgatttatagacaatattgagaatatgtttgaattactaactgttactagactgaagtgggaactgagctttgtctttatccatttattctttcatttcagttgcttgaagttctaggaatccacattttggaactgtggaaagaactagagtcttgcagtgggattatctatctctttatctctccaagcatttgtaggacatgtacctatttgccagataccacgttaaatgcaggaggcaatacaaagatgtacaagatattgccccttccctcaaggcacactgaatactctgcctgtcacatagtaagtgacttaaaagaaagagatagatttctgggtttgtttttgtttgttttaggatatatgagacatatatgtcaaggaggcggtataacgtagcagttaagaataaaagctatagatttagacagctttgcactgtaatctcagatttgctaagtagactagctttgtcttgagcaaataatttggcttctctaaacctgagtttcctcctctatgaattgtgttaatgctgcctaccttggagcatgactgtaaggattaaatgagctgatgtgtgtaaagtgctcagcactatgagtagtgtgtagtaaactcacaattattattatatcattatcattattacagagcgacacaacaccaagtcataatatatctcacagaagagacaccaagagccacagaaatccagagaagggagcactcagcaaaggctttgtggggaatgaccctggaccatttaaggataagagaattttctattggcagagataaagaaaaggtcattccagagaacgcagaagaagggacacaaacaaaggagggaagcaagagagaatgtgccaagggctgggaatggcgagacaaccattttgtcatgaacaaaaagcttgtgttgtgatcacttaatgtattcatcctgactctgaaatttccataaagataccttgccatgtctccctgtgtagaaaattgccgcaattatcctaatgctttgctggtctgaattggaaggcagttatgtgaaatcttgaagatgatgagatttgtttcctggaattctcagccactcattcttctaccagttttctctctcactgggtcctcccctctgccagtcatccggcatctctaggtacttaaaaaaacttactcatctttcttattatataaataatatttgtttattgaagggagattagaacacgcaagaaaatctatctcctgtgacccccatggaatttgacccagccatctcctcaaaaacacattcttagaaaagaaacagataaactaatttgcactaaggtggaaatggttttcaatgggaccaatttaagagccctttgcagactaccaggcctagaacttcagaatatataaataattatcagtgtaactttaggcatcagaaagcatatagggaagtcattttgggtggtaaaagtgatgccagtatctacttaaaacattaaagtatattatacataagctgttgggttgtgccttttaaataacttttaaacatttttattcaaaaataatttaaataatttatataccatgaaaacacttatcttttgtgtccagtaggatgagttttgacaactgcatgcacctgcataaccctcttccctattgagatatataatatttctatcatcacagaaaggttcctcatgccccttgccagtaatctcctctacagaggcaaacactgttattcatttttcacccacaggttccttttgtctgttctagaacttcatatatgtgaaatggcacagatgtacttttgcatgtctggcttcttccacttatcataatatctgaaagatacatacacattgttgactcgatcagtggtttgttcctttttatttatagtattctattgtatggttattccattagtttgtgcattctcctgttgatggacatctggattatttccagtttgtagctattatgaatagagttgctataaacatttttatacaaatcttttatctttctatcattagtttttaacaatttgattatgatgtgccctggtagagccatcattgtatttatcatgtgtgggtttcattgagcttcttagatctgtagatttgtatttttcatcaaatttggggaaaataatcaacactattttcaaaaataatttttctgacccaactttttgtctcacttttatttaggccaattacatgtatgctacactgcttaatatttttccatagatcactgtggctctgctcctttttttcctttttaacatttttctactctttagttttgatagttcctatgactgctcttcaagttcactaatcttttcttctgcagtgtcctctgttgttaagcccatccagtgaacttttcattttagatattgtatttctctgttctagaattgcagatggattctttttaaaatttttttgcttaccatttctccattgtaattgtttctttgtttctttattaaattcatattttcccttaaatatatgaacaacttacaatacctattttaaagtcatttaaatgaatgctaatcaattcttctctatcagttctgatttgtttctattgactggcttttcttctggaaatgagtcacattttctttcttctttgcctatctggtaatttttgattgtatgctagacattattggtgttacattattgactgccttggttgtattgtcttccttaataaatagttgaattttgttctggcaggcaatttacttgtgaatcagtttagtccttttgaagcttgcttttaagcttttaaagagatgatctaaagtagtctttaacctagggctagtttaggtctactcctaagcatggactttctggggcttctatgaatttatcgaggattctccacagtcttgtgccatctccagtagattggggtacagtatcttgcagttatgggagcaattatctttggtaatttttctttctctagtagatattttcctggctctgtgaagtcttatactgcacatgtgcagcacagtattcagccaaagactcaagggaatacctatgcacatatgtagatctcattgtttgcactgctcccttctttctggtgccatatcctacaaattccaggcacctcagtagctccaaatcccaatatctcttccctggcctcagcaagaccatgttttggccttcttttgtgatgtcactctccaacaagtgcctccagatagaaaatgaggtcaattccatgccttaccttatctgtttccctacagaaaattatctgtataattccggataggctaagttatactgtgaaacatacaactctcaaaatatcagtggtttaaaacaacagaggacaacttctagttcataatacctctctatcaaaagttgagggggatgtctgtgttcacagtgggatcagggattacagtcctttactgcctgctgtccagtgtttgaaagcagttatttaatatgaatattttttagtttcaaaaatgtttgcactaggacacatagctctgtaccagttattttatcttgaccaaagtgaaagaacacataaagtaatgctgtcagttcattttgcatatggaggaactgtagcattgaccatggattacctaagagctccatattaagctggaataacagtgacatttttcagctcctggtttctccaaccaaccatgtaatctctagtagaaagtaaatagattttggagctaaattgatattcatgaaaaccaaagcatgtttcacaaggaggtaacagattaggggtctaagctctgatttgctgcagtagccattagtgaagttcttccttattctggcttaaggtgatattacacttacttatacttagcaggacaaactctcttctagttggatggggccacaaaattagctctggctagggagttgtgagcagaagtggtatatgtcagttctgagtgaacacttattgctgacacgagcattccaatctctatttttttcatggtgactagcagtgttcaaaatggtgactcggtcagcctgggtctctaagtgactaatgttagcagagagcccctctctactttcaatggccgggtagtatgagcaagaggtagttctctattatgtccaaccactgcaatttttgaggtttgtatattttcataatgtaatttagcctaacctgagtgatacagataactttgataaaatttgctattttgattgtctaggttggttccccagaagcagaccctgaagtgagaattagtatacaagggacttattaaaagaagtgctccctgggaacattgctaaggaagtgcaggaagcaggatggggaagggaagaagctgagttatggaatgatctcaggcaaaaccccctcatttgtcatgctgcagcatgatctacaggggagctatggaatggaagttgtgcctcggtgatgtctcaactcaaggcaagtgagttggactatattagtccattttcacactgccgataaagacatacccaagactgggtgatttgtaaagaaaaagaggtttaatggactcacagttccgcatggctggggaggcctcacaatcatggcggaaggtgaggcttgtcttacatggaggcagacaagtaagaacgagagccaggcaaagggggtttccccctataaaaccatcagatcttgtgagacttattgactaccatgagaacaatatgggggataccacccacatgattcaattgtgtcccatcaggtccctcccataactcatgggaattatgcgagctaccattcaagatgagatttgagtggggacacaggcaaaccatatcatggactttcttatatccacatacagtctgggttggggaagggagagtggtgaatggggaatctgtagaaggagatacacgaacatctggatgaagcaccagcatggtatactactgtgatcccaggggagaaagaaaacactccataacttcattttcagttctgtacaatgggaagacacatcgtttcttgtctcttgtaagaatggcatggaagaaatgcacagcaatgttatttgagggtagaaatgctggtggtttcagtactctcagatggaaatacctttccccccttatgttattaggtcttaactgtcaatatatccctataatatggccactgaattttaccccaaaacgtttacattctctgctactttctcagcctctaaatcagcttagaatgaaaaaaagagcatcaaaatttgccttcaactcttgctacttattatttgctagctgctagcaggatactcagccttttgctgcacaaaaagacatgggtcaaaattgcttgtttctttgtcaccacttgatttacccactcaccagccccgcctgaatgactgctgcctttttatttggcttagattgcaaggctctgcgagcttgtctaatggggcagttttctttaccatgagctctgaatgagttacactgcctttgtgctcttttgaaaggtaaagcaaatggaattttgcctgccatgatttgaagtgaaggtgtgtgattcttttgctgcaattgatggtactgttagtgctgaaggcagatcaggaaactctggtctttctgtgttttggtgtgactaatgtggaaagacttctcaggtcaccacagtaaagtggtttgggaccaactgccaattaggggagtacagaatcatacccctcattttcttttcctcctatttttgtgatctcccctctctatactcgcacccttttggcttgttgccatttctagacaaagtatttcctattgcaatctcagtttttcatcttgatttttaagctgataaaatgtctattatattggcattatagctgatgtctaagcaaacttcactaagaactttgaaaaatctttactgttcactcccaccctacttactttccacatactgacattgtcctaattgtttagagttggtacttcccctagaattttctgcctccagctctgtcaactcatataccaaaataacatgtcaaatcagttgagaaaattgatgagactggctactgctacttggcattgtgtcaagcccacaaaacctggcaaaatcagctgaatttttcactttttttctaattgggtgagtaccatgtagacaataaacatactgtgtgattagagctctcaggcagaaagaagcagtctcatattttccccaaacatcattggctgagaagttagtggttttgaccttaccagatgtgtggccttgctggtcatattaatttaactaacattttagagtctcatactcctgacttatgtcttaggatgagtttaataatattttatatacctttgcagtttacaaagtgctttcgtataccccattttttctgcccaaccatgtgtcctattgattttgcagaattaaactgtgctccctggcttgagataatgagggctgggttgggctgaggagtgcagttgatattggtaatgtcaaagtctataagagatctcgagtaatcatgtaattaagcttccaaggacaatggcatcaaaactgtctagagctggatgtggtgagatatgtttgtaatttttcaagaaaggagatgctgcatgcttgagatgctttcaaggagatacagggtagacctgggctccaatcctgaatctaccacctatgaacggtgtcaccttgagtaaattctacatctgtgagcctcagttttctcatttgtaaaatgggagctaaaatgcctggaacatgcaatatagtcaagatgaaatgaaacaatgcctgtgaagcatgtgcccagtgcctggcacctggtaagtgctccataaaaggcagtgattattctgggcactgaaggattcttgctgttggatttcttcctaatgtttgcttccatcttttttagaaagctcaggatacggaaaataaatgagtgcttcaacccaactagtgaaaattcacactgtagagcatgagagatgatcgtgtccaaagatggacctgaaaacaggcagatttcctattttgttcagtgtcttacaggttcagggccaagcccggaggctgctgcctggaggctgctgcattattgatgtggacttgctccttgcacaggtgccgtgaggggtggtggaggaaaatagagacacagggatgcagagcagggatgccttttcatcgttctttcaatctgatacctggagagattccaacagaggagaggagaagaagggcctgatgctcactttccttccaggcatgagggctctatgtggccggagtccggaggtcttgtcccctgacagccctctctgtattctgtagtgtgactccacttccctacctcaagtgctctctgggctgtgcacccacccacactgggctctctttctttccatgcccctgcctctgttgaaagccctctccctacttctctttgccctgtcaatccctacacatactttagagcccagctcaactgccgccttctcaggaagcaagcttctcctgatttcccaactacctgcagtttctttacatgctctcatggtgaagtgaaaattgaacatttatttctattcttacttgattcatgcccactagactttgagacccatgaagatgggcagtgcctcactcagagcctggcacatggtaggtgttccctaagtatttgtaggctggatggataaatgggtggatggatgagtattcagaagcaggtacaatggtccgtggtttgcccaatgtgctgaagaagcaagggctttagcttcgctattgcctcgaagtagctatgttcagaagctttagatctctgggcaaaatacccacatacatagtgagaagaggcatgacagaaatgtagggcattcgtgtagccctagtgtgcacacacactcactctcatgtgcaccctacatatccctcttcccccaaagataacaaattttgggcttcttggttgttgtgcatcggtttgcccctttgaaagatctaccccttcctcttcaattcacctcagttccctagttctgacacatcaggctctgcctctgcttctctgctcatgagacctcctgccggcgacctatgtgatgggaccccacacccagcttttggaaactgccacctgcttgctccatatatctgctttctgggttctccaccctctgcttttcttctcattagtccaaagtcatgtggaattggtgtctggacatcctgaatttcaacccagtttctccatgatgttgagatgccctttattactgtttcttgtttgtccatttccacgagatgacaatgcatacagggaacctcatctcccagtgtcatggtgaagactcacctgtactcaagattcctttcctgttgctagaggttcttcataaatcgtattcagtatactgagatctttgaacgataagaccatacccagttggagaacactgtgaaatccctacttttctaacattttcagaattaagcatgcagtgaaaatggttcgcctattcaggagatattggccattaacccagacagatgctcacaaataatgtcttgcactcactgtataataatgagtgctattaaatatgaatgacctcatttgtcctcctggcatgtgtgtcccatagagagtgacacatatgtatatcgtcatttagcatctggagaaactatagcctagacaggttaagtgatttctatcaactcccaaggctaactattaggtgttgaatcttgagaaggcattgcactggccagacttgagttgtaaaagttgtaaattatagtgatgatagaataagaagccaaaatatatacactgatgtggatcaacagagttggagctaggtcaggaggggacacagcacacacagtaaaaacaggagaggagctgatcaggaactaagaatttagcgtatagaggagtcattgtgcctcagggcataaagagagaagctctaaagcatgcttctcaaagtgtaatatatatccagaactcctaggagtctaatgaaaacccagattctgatttgggaggtcagagataagtcctggaactctacatttcttcttcttcttcttcttcttcttcttcttcttcttcttcttcttcttcttcttcttcttcctcttcctcttcctcttcttcttcctcttcttcttcctcttcctcttcctcttccccttccccttccccttccccttccccttcctcttcctcttctccttcttccccttcttccccttcttccccttcttccccttcttcttcttcttctcctcctcctcctcctcctcctcctcctcctcctcctccccttcctccccttcctcttctccttctcctcctcctcctccttccccttcctcttccccttcttcttcttcttcttcttcttcttcttcttcttcttcttcttcttcttcttcttttcttcttcttttcttcttcttcttcttcttttcttcttcttcatttctttagagttagggtctcactctgttgcccaggctagagtgcagtggcacaatcatggctcactgcagccttgtactcctgggctcaagtgatcctcccacctcagcctcccaagtagctgggactataggcacatgccaccatgcttggctaagttttttttttttttttttttttttttttttttttttttttaaactattttagagacagggtcttgctgtgttttccaggctggtcttcaactcctgacctcaagcaatcctcctccctcagtctcctgagtcactgggattacaggtacgagccaccatgcccaatgtattctgcatttctaacaagtttccatgtgatgctggtgctattggcactggatcactgtgaatagcaagggtcttagccctggatgggattaaagaagaccttgtgtcaatagggctcctcttacctgaagtctcttttgaaagctccatatctactttctcagtagggtcttcctacattctagggctggaaaggtgatggtggtcagtggggaatactaggctatgcccaggtcctggaaattgaccaatgatttttctcctagattacgttagcaacaaccctactttttgaagattgggaataatttttcccctgcaatgattaattcaattggaagggaaaagaactccttgccattggtctctttgtgaaggacaaagcatgtatttgttcacagagttgaaataaataatagaaaacaagttttcctgaaagtatttacagccaagagcctcactaaaacatccactacacaaacactctgtcttcagcaagccagagccaagtcaacgttaaacttctcggcagccagtggctccatgccacttcagtttgccaagggagtgatgaaggatgcccagaatggagagcaaaaccttgcagagagacagcaaattatggcatcaacttaatggaaatctcaaatgttcacccagaggctgacagcttctgtgctcccaacagcccatagggtttgctgtgtagccactaaaaagagaaatcaaagtccagtagggagagagcttcacaggttagggccatgcaggctgagaaatagatacatacatccatagcttggggcactgtgcttcagagaatcagagacagtcttgcactggtgattttggatttttctaacagcagaactcaatagtattaggataggttcactgttcaccaagaattaatctgatgaatattttaccccccttaggtgaaaatgttcttagtagtggacccacctcattcatacaaatgcagacctatagtctgattctaaataattggtcctctgaacatatcctgtgataagcctaaagtatacacaaacttgcttggtaatagtcttgggcaacatgcagtaggaccgagagtaagggaagtctcattctctgctcttacaaacaaccacctggagactgcatctcatccaactccccagccttgaaagagacactacaatctacaaactcaggcctagaaggcacaaagaatatggttaaactgcatcagtttaaccatcttcatctttctttcttttttttttttattatactttaagttttagggtacatgagcacaacgtgcaggttagttacatatgtatacatgtaccatggtgtgctgtacccattaacttgtcatttaacattaggtatatctcctaatgctatccctcccccctccccccacccctcaacaggccctggtgtatgatgttccccttcctgtgtccatgtgttcttattgttcaatttccacctatgagtgagaacatgcggtgtttggttttttgtccttgcgatagtttgctgagaatgatggtttccagcttcatccatgcccctacaaaggacatgaactcatcattttttatggctgcatagtattccatggtgtatatgtgccacattttcttaatccagtctatcattgttggacatttggcttggttccaagtctttgctattgtgaagagtgccacaataaacatacatgtgcatgtgtctttatagcagcatgatttataatcctttgggtatatacccagtaatgggatggctgggtcaaatggtatttctagttctagatccctgaggaatcgccacactgtcttccacaatggttgaactagtttacagtcccaccaacagtgtaaaagtgttcctatttctccacatcctctccagcacctgttgtttcctgacactttttaatgatcgccattctaacaggtgtgagatggtatctcattgtggttttgatttgcatttctttgatggccagtgatggtgagcattttttcatgtgtcttttggctgcataaatgtcttcttttgagaagtgtctgttcatatccttcgcccactttttgatggggttgtttttttcttgtaaatttgtttgagttcattgtagattctggatattagccctctgtcagatgagtagatgcaaaaattctctcccattctgtaggttgcctgttcactctgatggtagtttcttttgctgtgcagaagctctttagtttaattcgatcccatttgtcaattttggcttttgttgccattgcttttggtgttttagacatgaagtccttgcccatgcctatgtcctgaatggtattgcctaggttttcttctagggtttttatggatttaggtctaacatttaagtctttaatccatctcgaattaatttttgtataaggtgtaaggaagggatccagtttcagctttctacatatggctagccagttttcccagcactatttattaaacagggaatcatttccccatttcttgtttttgtcaggtttgtcaaagatcagatagttgtagatgcgtggtattatttctgagggctctgttctgttccattgatctatatctctgttttggtaccagtaccgtgctgttttggttactgtagccttgtagtatagtttgaagtcagatagcgtgatgcctccagctttcttcttttggcttaggattgacttggaaatgcgggctcttttttggttccatatgaactttaaagtagttttttccaattctttgaagaaagtcattggtagcttgatggggatggcattgaatctatagattaccttgggcagtatggccattttcacgatattgattcttcctacccatgagcgtggaatgttccatcttcatctttcattctcagtctccttgcaaagccagtagtagtcttgggctgtggaatcagtttcttagtaggagtagtaaatcacctcacatagggtttgagcctaccaattaataccctgagactgcctttgccaacaaagctcactaaacagattggtctaagtaggataaatactaatcagaaaacagcatctctaatatgtaaaatctgcaaagagttcatcatttggtagaagctcagaagcagagaagacctgtggatttagaggacatcacatcatgacagtgagccacaggaagcaagtgttgttggaaatgtctgacctctttgaaggtcaattgggttttgcattagacagtgggccacaaattagagatcttgagcaaattccttagtctctctggaccttgatttctcatctataaaataatcttaaaggccttcacttccagctctgatattctaatttttctgggcttggaaaaccatgctcccagagctgcctctgatctgcgtgctgttctgagaccattgcttgatgtctttaagctctcttttccctctagcaatagttacccatcaaatgtcttatgatcattggttgaaagctaccagattgagaccgatatctctgttagtctctgacacttggatttgggttcatatatgtggaaatcaatctcctgtaagggtacagcagctgaaggcaaacctttttgaaatgctgcactattaacatgcccctttaatgggtttaaagtttgacatctgactaataccgacatggcatatgcctggagaattacagccatgagcttgggtaaaaacattttgagtgcccctccaatttttgttccttatggcaaataaaccacatgatgctctctttttagtactcagccaatgcctgggggccccaaggaagagtggaagatagctgaggaaagggagatctgatttattgctctgattaatcatggagggcaggcaggcattgctctgatgttggactttctcctgggaagtgtaagaacattattctcctcattccttgcacaccaagaacatttgctgctgcttcaagcacagaaagagttgcataaacattttaatattgcatgaggcttgtataagactgactgagtatgtgaatgctaaaccctgacacataaagagacagagagagagagactggtaaagacctaagattgtcttttttttttttttttaaatcaactggtgatgctgtctgtagtaactcagaatattttgatgattctcattggagaattttgtcattgtgatatatcaaagcccatgatagatcaagcccaaacaccacaaactgcagacgtatttcctatttttgcttgatttttcacacacaaaaaagtcataaaatcacaggcacactctttctttttctgtaatagtttggattttgctgttggatttctactaccccatatggagaggctggctttaaagagatttcagaactcaggtctatgtgtccttcctacagaatagcaggccatggcagagatgctagggggtggggaggggcactgcagggaaggacagttgcaggtgggcacctgtcacctgaaagagccccaggagagcagttgtgtagggaaaacttaacttgtttggtttagcattcagagagtcacaagaccatgtcatgggttaccaggcactgtcagtcatgctaccagagcctctagaacatctttccatagtcactctgttctaacccctaccacctaaacatccaattgccctttttgttgttttgattctaacttctcagtatttctcagatgcttcatctgatgctttcttcatctcaatcccagtccaagttcagatcatctctgcctggaccactgcactggcctctttgtttcttttaccttcatctgtcgaatctttggtacacaacgatttaaaaaaaaaaacacacaaaatgatcttttcaagacaaaaacttaattctatcacaatcatgcataaaatcactcaatgattttctctaggattcctttagaagtcatcatccttaatctggagtttgaagccctccagatctgcctccaacctactctccagcttcacctgccagtattccctgccttgcatgctatggcctagccctgttgtctttctttctgttccttgaacataccaaggtctctcattcctctggctctttacatacactgtgatatatatttacttctcagcctttcctccttccttgattgtaaattcattaagacatggaccaaaccatactcatcttgcttgttgttatggcccaggacctaacagggaatctgaccacacaataggcacttaatacatatatgatgaatgaatggatggacagatgaagagatgaagcagatgtattagtctattttcatgctgctgataaagacatacctgagactgggcaatttacaaaacaaagaagtttaatggacgtaaatttccacatggctggggagacctcacaatcatggtggaaggcaaggaggagaaagtcacttcttacatggatggcagcaggcaaagaaagagaacttgtgcaggggaactcctctttataaaaccatcagatctcatgagccttactcactatcatgagaacagcacaggaaagacttgctcccatgattcaattacttcccaccaggtccttcccacaatacgtggaaattcaagatgagattttggtgggaacatagccaaaccatatcattccacttctggcctctcccaaatctcatgttctcacatttcaaaacaatcatgcattcccaaccatcccccaaaatcttaatccatttcagcattaactcaaaagtccacagttcaacatctcatctgagacaaggcaagtcccttctgcctacgagcctgtaaaatcaaaagcaagttagttacttcctagatacaatgggggtacaggcattgggtaaatacaaccattccaaatggaagaaattgaccaaaacaaaggggctacaggccctgtgcaagtttgaaatccagccaggcaatcaaatcttaaatctccaaaatgatctcccttgactccgtgtctcacatccaggtcacacctgcaagaggtgggctcccacagcctcggacagctctgcctcagtggctttgcagggtacaggccccctcccagctgccttcactagctggcattgagtgtctgtggcttttccaggctcatggtgcaagctgtcagtggatttaccattctggggcctggaggacagtggccatcttctcacagctccactaggtggtgccccagtagggattctgtgtgggggctccaaccccacatttctcttctgctctgccctagcagaggttctccatgagggaccttcccctgcagcaaacttctgcctggacatccaggcatttccatgcatcttctgaaatctaggcagaggttcccaaacttcaattcttgacttctgtgtacctgcaggctcaacactacatggaagctgctaaggtttggggcttccaccctctgaagtcatggcccaagctataccttggctcctgttagtcatgactggagtggctgagatgcagggcaccaagtccctagactgcacacagcatgggaccctgggcccagcccaccaaacaatgttttcctcctaggcctctgggcctgtgatggggggaggaggggctgctgtgaagacctctgacatgccctggagacattttccccattgtcttggggattaatatgcaactccttattacttatgcaaatttctacagctggcttgaatttcccctcagaaaatgggattttcttttctatcacattgtcaggctgcaaattttctgaacttttatgctctgcttccttatgaaactgaatggtttttaacagcaccagagtcaccttttgaatgttttgctgcttagaaatttcatccaccagataccctaaatcatctctctcaagttcaaagttccacaaatctctggaccaggggcaaaatgccaccaatctctttgctaaaacataacaagagtcacctttgctgcagttcccaacaagttcctcatctccatctgagaccctcctcagctggatttcattgtccatatcattatcagcattttggtcaaagccattcaacaagtctttagggagttccaaagtttcccacattttcctgtcttattctgagccccccaaactgttccagcctctgcctgttacccagttccaaagtcgcttccacatttttgtgtatcttttcagcagcaccccactctactggtaccaatttactttattagcccattttcatgctgctgataatgatatatctgagactgggcaatacacaaaataaagaaatttgatggacttacagttccacgtggctggggaggcctcacaatcatggcagaaggcaagcaggagcaaatcatgtcttacatgggtggcagcaggcaaaaaaagaatttgtgcaagggaactcatctttataaaactatcagatctcatgagacttattcactatcaggagaacagcatgggaaagacttgcccccatgattcagttacctcccatggggtccctcccataacacgtggaaattcaagatgagttttgggtggggacacagtcaaaccatatcagcagagaagggagtcaatgtctggaacagtatctttctattatatctccctccatgtagaatcattgaattcggaaataaaagccagaactgagagagtccttaggaagaatataaccaacagcctcacttgataggtgaggaaaccaaggctgtgagaagtccagtgattcgttgcacattacacagtcagctaatgggcaaggactataatccagctctcctaatgcctattgcagtaactcttctggttcccttgctgcatccccaaggagttcatatttgtgacttgtagaccttcaggagatggaaggaatccttttgtcaatttataagtgaggaacctcactgaggctcagagaggccaagggccttgctccaggtcaatttttacacaccactcaagtcctagagaacagggatgggcattagccactgatcatagccactgctggctgaaatgaggcagcccaggagccaaaaaccatgtgactttgactatacatggagctacagtgatgctccctgagcaaatgggcagaattcagacttggccacatgaatttcccatttcctctgtcctcctcccacctgaaaacttgttctgcctttgtctcccctctgcctaagtaccctgggactttagttctctaggctgatcctataaactgccagcaggtgctaggtaatggtctaagaacaaccaggttgggagccaaggccttttgatttcagatctcctcgttagatagggggcagggatgaggccttggattattcgccattcagtcctttgactcctccctctgctgaatcaggtggcattgggacttgggagctgattttactggattattggagaaatgtgcataaaatcctttggactctttagggaaaaggacaatagaagttccagacatccttattatctcattctgcagaagaaggcctgatttcaggtttagaagctaagcatacagggcctgagagagcttcctgaggtccctttcctttctaataggtaggaaggaatgtccagacaatgtgtgcaatagccacctcagagtggcccttcaacccctgaatccccagtctgtgctcatcttcggaaaggctacagtgggaagggcagttcagacaagattgattttccacttaatcctggctggcaggcaggagattgagtttcccttctcttcccccaggcctgaggaatgggaacagctgagggaggccaggacaattcaattggtgaaatgcattccagaggtcttcctcttaatgccaggaggatgtcaggagcagagtgatctggagcaatcgagtgccccagaacccctacagatgcccttcatcaggggaaggtggccagggctggggatggcaccagcttccttttcactctcatttgtgggggttggtcttggacctttcagggcagcaggactgaatttcagggattgcaccttctcaccaggatatgagaacctcttggccctcaaattcaggtgctcttcacttcgatctgtgcaagagagatttatcaaaattggtgcttgtccccttccccgagaaagtcttcccaagtggtagatccttgaggggaggggagatgagtgtgggttcagagagggcagaggagagtaaaaccaagctagagcctgagagagaagcagtctccccctagtgactcagagggccacctccctagaaactataacaccgagggtaggagaagatgggtggttggtggggagagcacccgccattattctcacaaccttcctcttcttcctctggcaacagtgggtgggaaaacagaaggtgggttccatgtgatgccaccttcccctagtgccactgtgacacttgatttggcagtagtctcgatcccctcctctagtggaggcttcagccagacacccgccctcactcgggcaagctccaggtagaataagcatgctatccactagctccttcttctccacacagcatcactctgctctacccccaacccctgagaacaacatgtatccccaaaacaagtgtgctgaggtcaaaggctgcaggcctctgagagtcaggaacagaaggagaaggggaaagagaacactgtaggagcagtagctccagctctctgagtcccatttggcaagtgctgggttggttctccaacatcacatcacttctgttcttctaagaggaagattagttaagggactcaggtcacaaaaccagtcagtggcaaagccagggtcagacccagcacttccaggctccagagtctatgtcttgtaagtgtactaagaagacaagaatctcatgaatcttcatcttctctcatggcatgggacgtgcttctttttcagctggatccctatcctctttcagttttgtacattgctcaggctttcagaaaacatctatttgatgttttcaagaccaatgtattggttatctactgcagcataacaaattcccccaaaacttagtggcttaaaaatacagcaacatctgtgacattatagtttgggtaggttcggcatctaggaacaccctagctagatggttctggctcagggtcttttctgaggttgcagtcaagctgttggtcaaggctgcagtcatctgagggcttcaatggagctggagaatctgcttccataatggctcattggcatgtcctcacttcctccctgtgtggacttctccataaggctgcttaactgagctcatggcgtggcagctggtttctccctgagcaagtggtccaagagaggacaaggaggaagctgcaatgccttctgtaacctaatcctgtaagtcacatactgtcactgacaccatattctattcattagaagatagtcgctaaggctggctcgctttcacagaggaaggaattatgctccatctcttgaagagaggaataccaaagaatctgtggatgtatttaaaaaccatcacgctctgttacccaaggcaccccagtcttagggatagatgttttgttttcctgtcttgtgccaaatgaatatgggaattgcctgttcctcacctgcattggggcccaaacccaagaaagacacatttcattctgttctatccctgtaggatcatggattggggaatgtggatggtggaaggcaagcagtcacttccagtaacaccttttagtgacctgctgaccatggggagtctagcacaggagctgaaacattcagaacaaagtcctttcagcaaataagaacaaaaacaaacaaaaaaacacatgcaacagctctgagtttacttgttttaaccatttcctaatgctccaacataaatttattttcattcagttggtaagatcaatttgctaagaaactttttatggcaatgaattttactctacaccatgggagaatgcagtcagcggtgaaaacacctgggtgagcaggagtccagggcatcgcccagtcatccctctcatggtaataataacactcagagaacacgcgcaagccagcagtgtttcaagcagtattagctaatctgcttcacacaagaatcctgtgaagtaagtgctataactcatcctacagatgaggagactgagatatgaagaagctgtgtaacgtattccatgtgaattgagcagcagagcaaacctaggcagtagtgactgcagaatctgggctcttaggcattcttagtgctttacacatagccctggatgaaaaaaacaggaataaaacagtgtttctcagtttgtaatgtgaacatgaatctcccggagtctgggggatcctgttaaaaatgcaaatttggattcaataggttctggttggaggctgagattctttatttataacaggctccctgatgatcctgattggagggacgggagaggcaggaactacactttcagcaacaagatgtctcctcccttcccccatatttcttttcctgggggcagtatttctccactctggctggacttgggatcacaggtatggtggtaaagtggaggatgtggatattaaagaaaaagcaaaccttctgcctatgtgccaccctcagaagttctgattcacttggtctggggtgccttccaaaggaagtaggttttaaaagcatcccaggtgattctcacatgcagctagagtgcagaaccaagaccctaggtgtcaagctgcatattactaatgatatctctgcagccccacccaatccagaacctgaccagtctcatttccctttgcagaaactgtggccagggccgcctcacgctgtgccagccacagtcaaaccctatatctgctactgcgctgctggaggcacggtggacagaaaagtttgatgctatatttcttatgcaacggaatattcttggagcactaacaggctgccttgctttgggggcgaacagcaggcgctgcagattgaggctccagagctgggccagcgtggaaaacctgcgcgctgttcccagccagcgtgttgggtatgcaaggcacgcgccgggccgggcttcctctaacgtctcattttgcataacactttttgttttcattatgcctaaatttggcctgcccagagagcgtgattaaaatgaaaaccttattctaatagagctcgggaaatgaaagaagaaatctaaaaataggccagggaaaagggaaaaactcaaacggtataatgaccaaattgcttcaaacacacacacttgcagtcatttctcttcgagagagagaaaacagcagtgacatccatgcaggtgtttgtataatccgggtcacatcaaaactcctgtcagttttataaattcacaactctgggaaaaatggaagcaaacagtaataggagataataagaggaataataagtctgactccctgcctctcgcacagtggagtttggcgagccaagagggtatctgtaatgcactttgttctctgtggagaaacactggatggcgagaggaaatacagcgttagtattctagcacaggcctgatgaggactggccataagcgcttggtttttggcttcatttcttgctttctctaaaattagataatccagtcttaagagctcagtttaaacaatttctatagaaggcatcctctagttccctggcccaagttaaggcctccagctctaagttccgagaattccttccatttccgcatcagggggctcttttctcttcattacttttgtttaatctgtgtgtgtttagctctgccctgcatctatgtggacttggacaaaacacagtggtatgtataaagggaggaagagaggaatggaggaagggagggacggagggcgggtccttgggcaaaccatttaaattccctgagcttctgtttccaagtcagtataatggtagtggagaagaatttgggcagatgatccctaagcactctttctgttttgactctccattgtgaaactttcagtttttccaacctgcgggtcccctccactgggacagagtggttggctggacagacaagtggcagaagacatggcccagccatgttgctcacaggcacagataaggccaatagaaaagatgccatcttgcagtcacgttgtttattcacctctcatcttgtcccccactccaaccatgcagtatgatttataatttgtcctagttaaaactgagatccatgaaagctgacctatccagttgtcacagagaaatcaaagaaaggactaggactaagatcagtattcaggtcaccacccacccatcccccacaccccaccgcttagtgtgacacacccacctcctcttgtatgtaaaccttgaactcccacctggttggtctcaggctggagcaataagtggcagtgttgaagctgtgtgaccttgggcaggttactactgaagctccccatgcttccatcgtgtcctctgtaaaagaggaatggacagttttctacctcctagggttgttgtgaggatgtaatgagttcatacgcacaaagcacttaaaacaggacccaaagttaggcactcaataaatgtcagctctttttattgttccctctctcttgcatattcctgtctcagcctctgtgcctttattcatgagctcccactcctctattgaaatctgattcagctttcaaggcctagcccctcatagaccatacatcacatcccgtcaggctgggaggagctgtgcagataattaaatccaaccccctaattttacagatgagaagtcagaggcacagagaggcacagccaattgctcaaggtcgcagagccaggtggtgtggagctggctagaaaccaagggggaccgaccttgtggcccagactttccttccaacactggacagcctccctctttggaactcagagctgttattgtcggcatctttcctctggtgcttgctctcttgggaaggcttttttattagcgtataattagtaaacacttttagaatcgcctttcttgatgaatccttcatcccctgcctgctgggcatgttgctttgtacaaagtaggcattcactgataataataataataataaggtctattggattaggaggccactgtttacaaagcactttcatatatgtatgtaagtatctcatcgatgcaacaacccgtgaggcagagattatttttatctcctctagagagaaggaaacaggtttagagaaaggaagagcttgctcagaaccacccagccctcacccaggtgaacctctgtctgcaaatgtccctgttattcctgcttgcctgaatgaatgaatctattacttaatgtttcatgtggatttgttttgtttccttaactagaaagcttgagctgtgtgttaaaaatactttatcttctcgaatagcctacagtaatcacagcagattcataatgtgtacttgtggaagaaattaggcagttttctaccagcgcctccaaccccaaggagacagggtctgtccagacacacaaatgccgttggccatgtggccctaattcacttgcttcccggtcttgtgtttctcattcttccctgtaaaatgtgattaaagctatttgcctcctttcaaattctttgagaacaggctggtaactaaacattcatggactccttacacaaagggactgtaaacacaaagccaggagaaagagtgtatatggaatttccagggcctcagttttgggtcagtgtctcaggggcgcatcaggtagcagaagttggaggacagtggacaggaggtacgaggaggcatctggccaacccattcctggtccttgtttccttgatctttcattacattcttacttcattaattaataatgtcactactaccttaatattattcattaaaacagttgattccaggcaaccctgcatggcctcctctgtgaatcccacacgagagacctttctacagcccaacagcaggagagttccaaacaagaacttctccttcctcagagagggactggtggaagaaggggcccggcgcagagtcccagtgcctccctcaccttctttgcaacaaccagattttaaacagaactctttatattaaacatatggtaggccaggaatagcggggtcactcagagactttaatgaatagctcctgctaccccttcccctttatttttaagtaaattaagaaggttagtagtgactgtataaaatctttccaggtactgtgctaaatcttttccaaacttcgactgctgtcctcacaacttgcaagttactgttatcctatttgacagacaagaagacaaagcctaagaaagcctaagaacttatccaatgttgcaccattattaagtgatagaagtgggatttaaactcaatttagacagtttcaccaggaatatctgaggttccagacataccttgcaaaacactctagatttctatgattttccactaatggcccgcaccatactagatgctagatgttacactgaggccgagtccgtccactcattcattcattcattcattcattcatttcagattaaattagagggtttgtaaaacctggcattctgtgattctaaatcacaaccaccacgactactgccactaacattccctgcactgacagtttactagttgctaggcactgtaagtacatttaaattgtacttacaatttctcataccaatcctgtgaatagggattagtcccatttcacataggaggaaactgaagctcagataagttaaataacatggtcaaattcatgcaactagtaaagcagacccaagattcaggcttaggcatgcctgactcttttttagagacagtctttttttttctttttttggagagggagtcttgctgtgtcgcccaggctggagtgcagtggtgcgatcttggctcactgcaagctctgcctcccgggttcacgacattctcctgtctcagcctcctgagtagctgggactacaggtgcctgccacctcgcccagctaattttttgtatttttagtagagacagggtttcactgtgttagccaggatggtctcgatctcctgacctcgtgatccgcccgcctcggcctcccaaagtgctgggattacaggtgtgagccaccgtgcccggccttggtcatgcctgactcttaactcccaagcagagatgaggtgcttgactggagaaaggacatatataccaccatgaagggaactgggaggatcaccactgggctgtctggattaaactcacagctccaccacttacagtgcagcataacacggacaagtcagttagccgctgggcctcagtgcctcttctatgaaacagaatagtatgcctgcctcctagggttgctgttaacatttgcagagtgctcaaagtattagctatttttgttattttcttcttccagggacctgagtctgggctgttgcaccccaggggaggtcagccccaagtttctttattccttgtaccactgtgggagaaatcaggccccagactttggaagagaggtttaaagagatagcctctcggatgttactgaaatatgaacttatcctttctttctctccttaagtttcttccagacatgacagccatggacttaatagaattcaattcactaaaattctattcattctggatatgaatgatagaaggatctttcccaggaagctgcttatgggactgatgatatagatgctatttgccacacaattgtgagttacggggttccacaaggagaacagactgagtttagatgagacacttggagtcggcagatgtggatgctgtagagttcagcatcgggtccgggttacaagctgatattactacagtgggccattatttgtgcaaggcagggcctctcattttataaagaaacagacacccatatccctgtaagttctaggaaatttatttttatgcctcttcttttttaatataaataatgaatttagcaggctgtcttgggggagacagtgactccttgcttctggtgtaacaagaatatgcaaccttgagccctcaacacagttatttccttagcctgctttccctcctcctcctcctccatccactccctaattcccctcaaacccccattcttagtgctaagagattctagcttgtgacatctctgctgcatctttcttgggcacttactgcccagactgaaatggatgtttggcctttacctaaatatgaggtgaggacacctggaaaagacatttttgaatcttctttggtgcctggcacagtgcggaacctctagtagatgggctcaggaaatactggctggagaaaggcatgaatgtgctgtactctgtcggagtcagccgtatttactgggatgttcttcagcctcctccatgaagcttttcttgatggtgtcttcatctagaaataatgtcttccagtctgaaatcccatgaagtttatctcttaatggagcatcatgcttcacaatctgtcatacccaggtcctggtttcctggaaggactgtacacatcttcagatcaggaccaagttggcaccatctttattccctatacagcccctagcatggagtccattagggagatgtgtatgtgtgtgtgaacttgaacagcacattctagattgtgtgtgtgttggagggatgtacagccctagtgtccagctcagtcctaacacatgataagtgatccatgagcatgactacgtgaagcccaggtgggaaatgttgtagaggaaatgcagccctggatggtgggtcctcagaagtggaggtctccggacaggtgaccttctcccctctatatggcaccatcagccagatcaggggttcttatgtttcactggagccaggcaccaccttggttataccagtacactcacatgtgcttggtaaaaggcaaatggagtttaatctgaaaccccatcatttaaaaacaggaagggaattttttatatgtatgaaataataatgtaaattcttagggtgagtggtgcatagaagacactcagcagttgttagtagccttatttccctcctctcaggggtgtgttgcagtcagctcacccagtgccccgagacctaattgtacacaactctttctgactccatggagtgagtttttgttggtagctagaaattgatgatggcgggggtatttatgctatagaaaccagcaaatactacagagcagagcttacctcctctcttaccctcttacccaaagctggttgttaaacatttaccattggctgctcccatcccccaccccggcaggcttagatgctgtgtgcttggctttgttgtgtgtagctgtgattgggcacaacacctgagatctgtgaaggagatatgggtgagtatggaccaggatgtagaactgtgtgccttttgtgtctcatacttgtccttccttcgggaacctcctccctaggtaacacttgataggcacaaggaggcatgaagaacctgaattactgccttttcaaaacagggatttaccttgtcatctttgccatgtgtgtttcaccccttcagttttcctgccccttgcaccctctatgccaccttttccaaggctttactctaattgtgccatagctttgccaccttagcattatagagcctggggggacatttgaactggaaggggcgtagacagataccaatgcattactctggacatcatttatgcaatgagatacacagtatcaagagaagagaaaggcatcaccagtaacatgaacttgaaatccagatcagagccaggaatggaggagcagaaagattacagatcctacagtgcaatctgccatcctctgtttggccaggtcagctacatgccttattgtgtttgtgctttagagtcatgcctttggcatgaaatcagtttgtgttaggagcacgggaatatttcctgtgtgaagcaatgagttagttccatctcacacctgtcagtgagtcacaaacctgaatacatgaaagctccatccatgcagagcttttagaatcagggaacatccattttttaaggactattacatttgatctaatcctcttctcttgagacatggagataagcttgacattatgatgacccaatgtaaatactgtttgtaaatatctcatgggctggttatctctgcttcttttgtaagtattcacgggagagaccctggctttccatcctaccaaacttctttctgttgtgctacctcctcaagctacttcatgtctcatttcttgtgctcttcagtttcaaagggggggagtcagaatgtgccttctctcccgcttcacgtcccctgctcccctccagcctggccttcgacctcagcactgtatgaaagctccttatctgtgtgacacttgacaccttttttcttacctcatctctttcgactctgcagtagtctgcttgggttgccataacaacataccatggactggatgacttaaccaaaatttatgatttcacagttctagaaactagaagtccaagatcaaggtgctgtcagagttggcttctggtgaggtctctcttcctggcttgcagacagcagccttttcactgtgtcctaacatggcttttcttctgagagtgtgcagagagaaagctccctggtgtccctggtagagccctatctttataacttcatttaaccttaaataccctcctaaagactctatctttaaatacagttgcattgggaattagggcttcaagctataaatttggagggtacacaattcaatccataatgtatatattcttaatataaggcctaagagacagccagaaaaggccctgtggttgccactttatcagcacaggaaagcatagctcagaaagttcaagtgacttgcacaaagttgtcaggccagtcaacgttgaaactgggaggagaatctgcattttctgactctgcccctgatctcttcacattgttctcccaggccctccaatacaagttattcaagattcaagtcatacccaactaaaaatgcaatagtcttttctcagccattatctcattgataacatttgatagtatgactatcccttttttttttttttttttgagatggagttttgctcttgtcacccaggctagagtgaaatggtacagtctctgctcactgcaatatctgcctcccgggttcaagcgattctcctgcctcagcctcccgagtagctggaattacaggcaaccaccaccacactcggctgatttttgtatttttagtagagatggcgtatcaccctgttggccaggctggtctcgagctcctgacctcaggtgattcacccgccttggcctcccaaagtgctgggattacacacatgagccaccatgtccggctgactctctgtccatttttagaaattatggtatctcaattaaattaagttgtgaaggagaaaattttacccaaaacaccaccatcttgacaccatcactgttctttgtctgtgttacctttttaacccatatatagtcattagactcagttgtcaatgggaagttggaatgagaaatccatggacttgtcaaactcttcaagtctgacttgggaagattctaaagccataggcaaatacagaccacaaaatacaaactggttacagatagacaagtcctttctcagtgaagctggaccatccagcagccacttccctgtgctcttcacaaacctgctggacaatactagttgctctttggaattccctggccttgtatatgtctctggaaagtaatcatttgaattcaggacagagcagcagaagacacatcaagatcccaccaaacctatgctgtgactgcatctgaagatgggaagtagggatcatggggatctcacacactcttcctaatgtcctgcacccccaaaccaggataaagggctgttaggaagcaaggtgccaggcagcccccctcctatccttaaaccaaactccctcacggagataaaagtagtaaggtccagtagaatgaatatgaagggagtcagaccaactgtagttcacatccaactctgccatgtagtcatttattttttcacatcctcctttgttccagtaaaatttttgaatggctttctgccttattacttgctattaggatgacattcagaaagccatcttgatttcaaactctcagtatgatggagataataacagctaccttgcaaggaaggctgttttgaggattaaatgaaacaatgtatggaaggtccaagtacaacatgtggcacatagtaggtgcccaacacataatattcattattttaaaatggaaatgtacttgtgtggtaagcttgtgtttccagaaccttgcttaagtaaatgctcttcatccatattcttctgtaaaactcatatgctctccgatgtagtttagcttctgcataaagtttacactgacctggtgtcatcaataagggactcattattccactggtttggtgaagcaatccctggaaagacattaggatttgggaatggcaggtgagtatggatggggctaaattatttacttcatcaaagtgtctctgggctttatcatgtaggcctgtcataggaagctgtacataaagatgaataatggtccctttaactcagggatctgaaaggtcactggggccgtggcagacatataaagttgtgtttgccgcatccatcaagatgcaattgtgtatggatgtgatgcatggcaggcagtggaggatggacttttgctttccactttgtatgctggtcatgctgggctgcaatgtggaaaggcagtgatcagccaccagaaggcccaaaaccctgtgctgacaccacccttcatggccactgcctcctatgggggagcattcagagcagcagggatttggagcacgggccagtgagaagagggtaatggcttgtctgtttttccatctgataggtatcctgggtctcagctcactctatctcccagggatctaggaaattgatggaagaaaaatgaggcaaagtgactaattctgtcactacgatgtgatgcacctcagggttggggatcagttggctctgggtttcaggtttcttggcctgaaaaggagggactgagactcttgggatccagagcttcagagaagtcacgtggcttctctgagtgccagatgcttttcagacgaggctgcctttcatcttctctccaccttcataggagacaccagacaaatgtgacactatgggcaagtcatttcctgcactgggaccaacatccttgttctccaaactctggtcacatttgtgccacctccattatccatgtcctctttgtgtaacttgtacttagtatcttttcccatagactgtttttaatttcaatgcatttatttttaaggaagaaaccttatatggtttagtaattgcatatagaaaatacattaaaaaaagagataaaatgaaaaccaaacaatgagattagatccttgatagatgctttggccaaatcaaagtctctaagcctgaagcttgctctctctttgttaaaaaaaggagcttggcaagtgtcagagaagcagcacctaattgaaactctctctctttgagatactcagaagggttaaaagagaattaaaaacagacatcaccttctcacaatgtgatctaatgttatttaataatccatgcctgtgttatggaaagcatttcccaaaccatctacagtgagatgccataacaacaatagtatggattctatactgtggggaaaattctacaaggaaactttaattcccttttaactccacatttttattacttcatctattatccataatgatcaccttattaaccatttatatttccattttcactggtactacttgcttactggcttgtatgaagctggcatttatttgaactcccacctaacacttgtaccttcaaacaacttccaggtgctaaaaccattgtcactttcactcagcaaatcatcagagcctggaggcaggccaaggaacaagccctgagacttcctctgcccaaagctcctggcatgtgttgggcccctgagcacagagccctccctggcagaaggacacctcctcaccctcttcctgagggctgccaccattccaatgagtaatgttttcagacagatgcaaaatcaatagcacaagactcacaccgctatggttatcttctattctttttcattcaccctcccttggcttccttagatgagagtctggggagagattcgtctcctcccttgtttcttattatgtcactgttgtagccacaggggcgagaataacagatatttctaggttgtcagggagagataggaaaggcgagctcttggtagcacctgacaacttgccataaagactcaaggcactatttgtgggctttaagaaagttaaagttttaattgtcatcttcaatctgcacagattgtaatccttgctaaggattgctcccaagtgaaatttgaaagtactttaggtggtcgggttgtctaagatctctttaattatggtgtgtgtgtatgtgcgtgcacgtgcacatgtgcgcacacatctatgtttttccttacaattgtctaacacagacctgtggtcttttcctccaagaaccctgtttgttcctcttaccaccatctaacctaagaccgtcttctgcaactcatttgttttgcttcttgtgtctttgccacccagaaatggcccccatgcgtgcctgtacataccctatgcagtggggagagttgtgatgaatcagccatttccccatctgacttcctcatggtgtcaccaactcctctaccttcccccggaaggctttaagtcctcaccaatctattttgacaaaccccagcattccggacaacatctgcaaatattgacattgctcaggtagaaaatcctgccaggtgaggacatgggcaggtagtctcaactgggcttcagcacagctcaaagttttcagccactgtgcaattttagttacctttgtgtttgcccacatcagctggcggctccttctctcccaactttaattgtttaacggtagcttctaagctatctttcattttggggggtgttcctagatttcgatctcattttctcttttctaaatgatttctttcctctgctgttatcacatggaacccttttcttctgatttaaaacactgttagtctttctcccatgctattaagaagcttcagcatcccacacctctccccactgacagcaattacagacccaatgcacacacgcacaccgtgtgatttaggctttgcattcaactctctctgacctcttaccttagtcttaagaccatcctaagggattcaggcctttccatatggtatcacagttagaagactatgaaaaaaaagataacaatgcattgatttttatttaaacatctggatatttgaaggcttctggaaattacttacctactgaagcctggggacgtatagacacacacagacacccctccatttcacctcctcactcacatgtacatggcttgtcaaatgtgctgagttccttatggtttgggttctgtaatcctcagctggtatctctgctacctagcccagcaatatgaagatagtgctcagatacaggagtgaaatagagatgaagagtcagggatggagaggtgggagaaaccagcagcctgaacacataaacagagatgattaaaaagtgctccccattattcacaatagccaagacatggaatcaacctaaatgcccatcaacgatagactggataaagaaaatgtggcacatatacaccatggaatactatgcagccataaaaaagaacaagatcatgtcctttgcagggacatggatggaactggaagccattatcctcagcaaagtaacacaggaacaggaaaccaaataccacatgctcccacctataagtggaagctgaataatgagaatacgtagacacggggaggggaaccacacacactggggcctgtctgggagcaggaggaaggagagcatcagcataaatagctaatgcatgtggggcttaatacctaggtgatgggttgatacatgcagcaaactaccatggcacacatttatgtatgccatgtaacaaatctgcatgtcctgcacatgtccacactatgtaacaaatctgcatgtcctgcacatgtatccaagaactttaaattaaattaatattttttaaaatagtgctcccaggagctcgagcctatttgtatagtgcttctatcctgtagcccttaatgtgtaaggactccttgtctgttatgttagctgccctcacagtcattctgtggggttggcgaggtgggcactatgactgttctcatttcatttaataggtgatgagttgtttcacagtgggcaggtctgtgcaaacttagcccccaaagttcaaggaagctgagaggctgaaaaagaggctgacagatccagtttctcagaaacatttaatagaggcttccaaacagaaaccagacaagatagtagatctctgcaccattactcctcaggcccgggaaagggggatatgtgattcagaagtgatgtgtaggacaatcaacgcaccataacatcaaggttgttttgacatctaggggcaggatttatagtaaatacagtgctgttatgcaggaacaatagataaactggaaatcttacaggccttccgagaactagggttactcaaaagtcaacatggcagattagcatccaagatggagtttctttagcccccaacatgggtctaagaaacagagagggtgggcatactttccaacttggaaaaagtcagaattaggactaatgggctgcgacgccagccctggtatcaccttaaacccaacgcagacaatggaaggcaatggaggtagagtgggagtcacaggcctccacggccgccaggtaagtgagctatgatggctcgataacctctctgaacctgtgttgccatatctgctgaaggcacacagtcttcctggcctgccttacttttaaatggttacagtcttaagctgcatatgaggtgagggtttgaaagtccgttgtgacccaaacaatgctgggcattagtccgtgttaggcttcagggacaaatccataccttgtatccaggcccattctagatatttaaagtctcattagttgggagtggaatgagatggcatcaagggagacagagcatgggctgccctgccttgtaccccacctgtctgtggggccagtggcaacaggcagccacttttaactttcacttggaaacatatctttacattcagtagctagttcttagaagatgagattactgttctgaaaatgttctaactgcgggcttcacagataggcaggcttttatattttgcaatgctgtaatgagcaaaaagaaaaagagatttagttttcctggtctgcccctgagtattgcctaattgtcttgaaaaacaattgacttggtctttctcattcagcttctaatactgaacatatgtatattatgtctcccatcttacttatctatttaccactgttgcttgggggaggttaatttattctcagcctaagttgtttgttccctaaaaatgcctcctgtaagggacattgaggcagagcccatatacacatgtaaggaaatggagaacagcgtcttttatgaggcatgacgcaccaaagggtttgggcttccttcccccacctccaacctctaagcttggcatcccattatttatctgcattacttcttaaatctacatttcactatgtagacaagccgagacaatgtttattctacatgaatgaatcaaccctggtgcagtcaatttatttctccttagtaggataaaaagacaattgccatgtgatggattggatgaaacatagagcaatcggaaataatggtgaagaaggtaaagaccagcaccctgacagcccaatgttatttttctctctaaacagaggcggatatggctaaacccctctattcagtttccacaccttgactgtgaagaataccccaagcgtgagagtggacttgcgtaaacaaccaattattgttttacaaagttaatcaccagttgctggccttttagttattattaaggaatcagtggaattcaagcaaataagagtctgactctattcagctttacaataatactttgtgggagcttcatctcttctggcccattctctgcccacatctgctgcctaatgggctaggttgttcagaagctcatgttgatggagttgcagcaatgacagatttctttggtctgaattacgtggactattgcccaaattgccactttttgttttgctggcatagacacagctcattgagaatgagtaactccctgaggttgctttaaaaaaagatttggcatttaataaaagcaattccttacttgcataacagttcaagccattttagataattaagaaagaattcctttgaatacattgtaactactttttaaaagttctgttatttttttaaaatcccatttaggttatttgcatttttccaagaaacagagaactgtacctaagccaaaatgcatggtttgggggtcagtgttgaggggatggctgtcactgtctaaaatatgtcttgggccttctgtttggtttttcaaccctttcctccttctcctcattattataaaccacaactgataaccaaaaaaggaaaaaaaaaaaaaagagttccagtctcttttgtttcttttcccctttccagtgtaggtacaagggtatagaacagtgatctaaaaatcatattggcagaaggggatgggtagagaaaaaatcctgaataatctaccaacttgataatcataccctgaatatagatttgggatttggctctggagggttttctcccctcccctctcttcccctcccctcccctcccctcccctctcctcccctcccctcccctcctctcccctcctctcccctcccctcccctcctctcctctcccctctcttcccctcccctcctctcccttcatctcccctcccctcccctcccctgccctcccctcccctcccctgccctcccctcccctcccctcccctcccctgccctcccctcccctcccctcccctcccctcccctgccctcccctcccctcccctgccctcccctcctctcccctcccatccccttccctcccctcctcttctctgctctactctcctctttctcttgataagcaagaccatggaagttgcccagtgcaatcaacctctaagctttcttcttttctcattcagtctccatacttcactgagcttaagtaggtaactattttgggagacatgcatgggtttcttatgtgactgagccaaatatatttaatcttgattagttttgggagattttgttttgacatttaaaccaagtcaacatttaaacagaattattttctttgattgtacagttttccttacagaacaagaggtagattttgatttggagtttatcattattatcatcattattatttatgtcccccagacctaggggttaagaagttgtttactctatcatttcccaaactgatttgccctgcagtggtactgcagctctgtagtagaaagaatactgacataagagtcaagtgaccttcaggatcctaaagctgattcttaataaataactgtggttttaggctgtgatttctcagcctccatttcctcaatattgaaatgatgtgttactggataatttctaggagcccttttaacttttatggtttgcactagcaaatggagagctgtatttctgtcctcctggaaaaagaaagaagtcaggcagggaggcaggaaggaaaacagaaaatgaaaaaaagttaagtgaaaaacagaaggcaaaaccaaggaatagaggccaatttctactaaagtggttgtgtggcatccctgatccttgaaggctgaaagtcgtgcagcaatagcatacagaatgcacgatgcaggcaaaacctatatgtctaggagccgaacttagaatcgttaaaagcaaatgagaaaactgaggtgttgctcagtataggtaggagctagaatgctcatctgtttttttctcgttgttgtttgtttgtttttttaataaaactgtctctgggactgagtgatagatgactagtcattgagcttaaaaattctatgtgtttttcaaattaggtgcaatgaagaggaactggaaattgggaaagcaaatgggttattgttttccatgtttcttgttttcttcgcctactcttggtggaagacatttctcacagtatctgctagttattatgcatagcttttctttttcctccatcagctaggtaggggagcatattcctgggcctcatggtcttccataggttgaaggttgtgtctctcttgccatctgtaggttcttgggaggttgggggagctgcttcaggacctgttcctccctgaggttgctctgcccctcacagtgagtaggacccacctaccccgatttgggtgagagaggggaggccagcgcccacgggagcccacaggagggagagaggagcatgggcacgcttagcggcgtggctctgatctgtcaccacacatcacagatgacaaatgactatactgtaaattactcagctccccaaattgccttatttaggactcagaagccccatgcgttgggaatattgtggttcttcctctctgcctgttttaccttggtggttggatgggtgtggggtagatttgagcccagagggctctccttgcatctcaaagagaagagcttgttgttaagtctgaggtgtaggaaacctgagtgcctccagggctctggtccttctcagcaacctccctgttgccacacttcagtggaaattcctgggtaccctaatcctaatgattttagggctggggttggtagctgcagggggttgtaaggagttctctgtccctgttgaccagccacttctgccaagattcctggtccataaggaattatcctctgcatagtcccaacaccttcttccaactgttttatgtgatcatcttacattgcctgtgaacgcaataaaaccaagtaatggttcacattccttgcctgagcttcaggaaacggctgggaatgatgaagaaacatgcaaggatttgtttctgtgctcagatgctaaggactaagtctggttccttgcctttgcccagcatgctggtggctggactttcctgaagtcctctgagaagttaatcctgctatctctcagccatgagggctgtgccccacctgtcactcttcagcctcctctcaggcattgcctcctctgaggggtcctccctggctttcacattcctctccacccctcactttcatctccaatgagtgtcctcattccggactgtcatcattcttagagcacggcacgcaccacactgaattatggttgttactttgcatgttcacctcccctacttggagtccggagctttgtcctattctgcaccctaatgcggcacagtgccaggtacagagaaagttctgaacacaggtgtgctgaatgaatagatgaatgcaaggatgctggctcggccacagttgttgtcattgtactttttggtctagttttgcatttcttgatcagccaaatgtggtttattgatgacaatacaatattacagtatgcctttttctcattttgaggtctttatgatgatttttaatgtatttttctgttatttttgtttgtcaactcttctctctcttaaaatattgttttacatttttatttattttactttatttctgagtcagggcttgctctgtgacccaggatggagtgcagtggtgcaatcatagctcactgagccttgaactcctggctcaagtgatgctttcactttaatctcttgagtagctaggactataggtgtgtgccactgtgcctgttttttgtttgtttgtttgtttgtttgtttgttttgttttgagacaggatcccactgtgtttcccaggctggtctcaaactctgggcctcaagctattctcctgccttggcctcctaaagcactgagattataggtgtgagccactgcacccagctgctattactttattagtgtttttaaagtgatacatggtcattctttccaacccaactcttctgtgaccccattctgaaccacttcagcatccaagttggtgcccttgctggatttcaatggctaattcagaatttagaagtttctgaaaatgtttcttttcaacactcaaaagagaagtggaaacaaatgatagagaagcaactatggaaagtttgttggtttttatagtaacctggctggtgaaaaagcccatatgaacaatatctagctggtgcagctgtggcttccaatttcagacaatttcaaatcccctcatctcattgatttctcacaatagctgtgtgaggtaggtggagcaaattttctaaaatttctattttatagacgagagaatggaaactcagaaaagctcaatggcatatccaagttctcactggtggtaagcacaggaggaatagagccaaggcccctgactaaatgcagtgtcctcgccatcacaccgatgacctctccattctttccctctttctccctctcttttttttcccccaggaaaattctccagaacggtcagagtccttctctctaggattgaggtttctgggtattattctccctggggtggggataaagccgtccttacctaagtgcggcttaaaggaagaaaaaagttctttgggttattatcatcctacctttggatgtccatggaagcatagagggttctagatatggtggcaaatatagaatgtggccaaagactgtcatacctctcgagagcttcaccattctttaattgccttttaaggtacatttgctgaaaagacctggatgcgaggagcgggggtttttgtactttgtgatgaaaagaccaaattctacatattttctgtccagcacaaaatctcttcaaatcatgtatggtttctaaattttaaacaacaactcacattccagcaatatttgaaatcaccagtttccaaatgcaatagaattctaattccttagatttccctttgatgggatttctgtggctaattttgtccctgtgagtgaacctagggctgagtgtacttggctttcccaaaatggaaaggagctggtgatgataccaatttaataataaagcatccaaaagactccctctctcacacacacaaagagaggctttggccacataagtcccaacatggtgatggttatttccttttggatttagccttctgtgcttgtttctttattagctgatgtaatgaaggacactggcaggtgtgaggaatctggctgctaggctttgccctctgggatcgtagttgatggcaacaccaaatagtgctcacccttaagatacctggtcacaagcctgcaggcagctttaagacttccttactaaccaggaagatatggagcttaccaccccgtggccttccgcaggtggctctacttactccttttcatcttttctggtaccctttggatggccacagctaaagctttcttgacccaaattcttgggtcaatgagtaaatgaataaacaggtatagtgctttggtgaaagtaaaaaaaaaaatcctatttatctgctttttgaaaaaaaaatcaacaaatatttgtttagcacctactttgtgcatggatatggagatgagtaggaaagagtccctgatttaaggagatttaaaaatctaacactactccagtaactagtcagaatatcagttccttcaatcagcaaatatttagtgagtccttctacactaagcaatgtccctggcacttgggctatactggtgaatgagacagacatggtccctgccttcagggatcctagagttccaaaagggagagagacacatgaacaagcaatgatagtggggatattactccttgctgtcctttgatgggagaaggagagtgtctgataaactggatcttaagagagattcacaggcaagaaatcaaatataactggggtgcaggggcaaagattagaggatgcttcaaggagaagcatttgaaaaaaatctttgaaagacttatgaataggagcaggaggtgagcatttttggtggaggaaatagcatgagcaaatggcaaggaagtgggagagcagagtgagctcaagaaacagagttatctggactggttagaatatacaggatgggacagttaaaggaagttatgagcagagagctgctaaacttcatttgtttttaatttttttaaaatgatggcaatctaaagaaaggttgctaggatagtattgtttgtttctatacatctttctgttagattttataatctaattatttacattttgccatattgtttctccatatatatatgtgtgtgtatgtgtgtgtgtgtgtgtgtgtgtgtgtgggtgtgcgtgcatatatgtgtatgtatgtatgtatatatgtatgtaatttttgttattgttgtcattgagccatttgatagtaagttgtgagcatcatgaccttgtgtctcctaaaattacactaatagaattttatttgtgcttattcttctacatttaaaaaaactcatgaaaggtagctcacctcctctccccattgtcataccccgtgccccaccccacaccggagcttcttttaaggtagttgcagctccatttgcatctttctgagctttgaaatgaacagctgctgaatagctaggttgcttagagaaaagaaacgagtttaaacaactccaaagttattcgtagtctctgctgggttgaagcagacagggccatctgtgctttctgttcatatctcaggacctgaaagaaaatattctatgaggcttaggagaaaatgacataaaatgaatccattctgttgtcagtgatcataatgaaactagagaacaggtacaaaatcaattcattcttattacaattttcagattgccatcttcccatttgttcagatgcaggtctgatggctcaaattggtctttgtaatatttaaggagcttttttggtcttttaatattggcttatcagttccagtaattttacctcccagagtgaaattggctgctaacgtttggaggaaatccgtgctgtatttttcgtaagttttgctgatcgtcactcaccaggctacagtaaatgtgcttctggcttattaagaagacagccacagagactggatgctttattacagatctaccgatggttccaggagctcttccctagcagagagaccctttgtgaagtatttatctatttatctatttttctgccataatacctagatcttctgtttagacgtcttctcatttgaccataaggataaaagagaaaactcaggcctacaaatgattcttttatttctccttcaaggctgtgtgtgtggacctcatagagagagattaggaaggaaaagaagggcagaaggaaaagcagttcgaaggccgttgtcaacctcatcctatctttctcctgttgcaaagtaataattggaatatgcagttatgtcctttttataaaaatgtcatgctaattataaaaataatgcatagtaattatttttcaaataattgaaaaagaagaaattaattgttcataatactacccaccaaagataactactgttaacaatttagtatttttaaatcagtctttgtgagtttaaagactagagttgattcatataaaatttttaagatgatattttcatttaatattacataaagtcttagtcatctttgttggaagttacataataacttatcttttggacatgccatatttactttatcactttttatttcaagtagctactttgcttcctagttttgttctgttttgtttatcctataaagattgcagcagtgaatattcttatgcaaaaaagcttttatgtgtataacaggtaattttcttgggatggatttcgatgagttaaattactgggtcaaaaaataggtatattgtaaaggcgatctatatttgcctttagagagttttttaaaatgctcttccagaacaatttatactcccactagaagtgtataagaatgcttatctcacgcaacacttgccagaactgcatattatttaaaaatattttttaattagatgggcaaagaaaaactgccaccttaaattacaattctttgcttaccagcgaggctgaacaacttttcatatttgttagctctttgcgtgtgtgtgtgtgtgtgtgtgtctgaattttctgttgatgttcatagccttttcacctgcctgtcttagtgtttttctaaattatttggatgatatcaggactaaccctccatctactacgtttgttgtaaatttttcccaatttgaaagtcttttgcaatatttgtatgcagttgtaacacagacatacttccatttttcgtgctttgctttatttcacttcacagatatcacaactttcacaaattgaagttttgtggtgactctgcttggaaagagtctgtcagcaccatgtttccaacagcatgtgtttccttcatgtctctgtgtcacattttggtaattctcgcaatatctcaaacatcgttaatatatctgttatggtgatatgtgattggtgatcattgatgttactcttctaattgcattgggatgccacaaaccatgcccctataaggtggcgaagttattcaataattgtgtgctctgattgctctaccaacctgccattttcctaactctctccatctccttgggcttccctgttccctgagatacaaaaatattgaaattaggccagttaataaccctacagtcgcctctaagtgttcacgtgaagggaagagtagtatgtctctcactttcagtaaaaaactagacatgattaagtttggtgagtaggcatgtcaaaagctgagacagatcaaaagctaggcctcttgtgccagttaatcaagtgtgatggaaaggaaaattattgaaaattaaaagtgctaccccagtgaacacacaaatgattttttttaaagcaaaacagccttattgctggtatagagaaagtttgagtgttttggatagaagatcaaatcagccacaatatttccttaagtcaaagcttaatctagtgcaaagttcaactctcttcaattctatgaaggccaaaagaggtggagaatctgcaggagaaaaattggaagctagcagaggttggttcacgaggttgaaggaaaaaagccatctttataacatgaaagtgcgaggtgaagcagcaagtgctgatgaagaaactgtagaaagttatccagaagatctacctaagataattgatgaaggtggctacactaaaccatcaaactaggcaaaacaaccttatattagaagaagatgacacttaggactttcatagctacaaaagagaagtcaatgactggcttcaaaaacttcaagggacaggctgactctcttgttaggggtgaatacaggtggtgattaagttcaagtcagtcttatttaccattctgacaatcccagggcttttaaaattatgctaaatctactctgcctgaattctataaatgtaacaacaagggctgaatgacaacacaagtgtttacaacatggtaaaccatgtaaactgaatattcaataaatggaatattttaagctcatttttaatacctactgctcagaaaaaatgattccttttagaatgttactgcccattgaccatgctcctcatcactggagagctctgatggagatgtacaagaaaattaatttttttatgcctactaacacagcatcctttctgcaatccatggatagtggactaattttgactttcaagccttattatttaagaaacatgtcttgtaaggctgtagctgccatagatagtgattcgtctgatggatctgggcaaagtaagttgaaaaccttctggaaaggattcactactctagatgccatttagaacatttttaatgcatgggaggaggtcaaaataacaacatgaacaggggtttggaagaagttgattccagtcctcatggattactttgaggggttcaagacttcagtagagtcttcgttggaggcagcaattggagatgtgatggaaatagcaagagaactagaattagaagtggagcccaaagatgtgactgaattgctgcaacctcatgatcaaacttgaacggatgagatgttgctacttgtggatgagcaaagaaagtggtgttttgagatggaatctactcctggtaaagatgctgtgaacattgttgaaatggcagcaaagggtttaaaatattacataaacttagttgataaagcagtggcagggtttgagacgattgacttcaattttgaaagatttactgtgggcaaaatgctatcaaacagcatcatatgctacagagaaatctttcatgaaaggaagagtcaatggatgcaacaaacttcattattgtcttattttaagcaattgccacagacaccccaaccatcaatattgaggcaagaccctccatcagcaaaaagattatgactcaccaaagacccagatgattgtcagccattttagcaataaagtatttttaaattaagatgtgtatatttttttagagattatgctattgcatacttaatagtctaagtgtagtgtaagcataacttttatatgcaccaaaaccaaaaaatgttgtgtgacttgctttattgcaatacttgctttattgcaatacttgctttattgcagtggtctggaaataaaccctcaatatcattgaggcatttcaaatggtcacattttgctcattttcttttaatcctttttactgattttaatcttagaaaatcctgtcttatctaaagatgtgtgaaataccattttgtgtttccattgagttttgttatggattatttttcttacacttactttatctgccttttattgtggtagatgatttgaattgagggttcaaatgagtttttccccaaaacttaactagtggcccccagcagtaattattatctagtgctaccctccccctgaaactgagatgtcccatttattacatattaaattcttatacagacctgagtctgtttctggagtctccactggaatgttccattattccatctatctaccttctgcaactgttccactgttccatctgtttttgtgttagcaccacacattttaagaatgaaagctttataaaatacctaatgtatagttagagaattccccatccctccatttgttttccctaacaaaaaaggttaaaactatttttagctatttgttgcaacagaggagtttcagaatcatttttcaagttccaaagaaattatattcatgttttggttagaattgtttaaacctatacatggacacttcaaggttacaactcttatttcataagctcatgttatgatcagaattgctgattcctaaacatctatggaaaacacaaaatactcattttcagataacttagtgcatctgaatcacccgattgtttagagaaaatcctgaaatgcaatgtttcaaattccctcaaattataattattaattgatgatgaatgacaaagactgtcttttggtctatattgcacaaaccatataaactagttgaaagtaagtcaataaataaatggatggatgaatgaatgagattacaaaagcgtcatgaaaaacaagagatctggtctaccagaggccttcagtatcatctgggcagtggtgactattgtttggaaatatatatatatatatttttaattatactttaagttctgggatacatgtgcagaatgtgcaggtttgttacataggtatacacatgccatggtggtttgctgcacccatcaactcgtcatctacattaggtatttatcctaatgctatctctcccctacccaccacccctcgacaggccctggtgtgtgatgttcccctccctgtgtccatgtgttctcattgatcaattcccacttatgagtgagaacatgcagtgtttggttttctgttcttgtgtagtttgctgagaatgatggtttccagcttcatccatgtccctgcaaaggacatgaactcatccttttttatggctgcatagtattccatggtgtatatgtgccacattttctttatccagtctatcattgatgggcatttgggttggttccaagtctttgctattgtgaaaagtgctgcaataaacatatgtgtgcatgtgtggaaatattgtctgacaacatcaattacatatggtacagagataggaaactaaatgtttattgagttacactgggcattttgttaggtgtttttcacatgttatctaatagaagaaaaataagataaaggaaaggaagagacttgccaagaggtcacagagactgtaagaggtggacccagatacagattcctatctcttgggcttcagagcctttgctgtcactccagtttctgcagcctggagtgacaggtctaatgtataggatcttaaaggattattttttggccgggtgaggtgactcacacctctaattccagcactctgggaggaccaggcaggtggatcacctgaggtcaggagtttgagaccatcctggccaacatggtgaaacctcatctctgctaaaaacacaaaaattagccgggtgtagtggtgggcacctgtaatcccagctacttgggaggctgaggcaggagaattgcttgaacctgggaggcagaggttgcagtgagccgagatcgtgccattgcattccagcctgggtgacagagcaagactccatctcaaagaaagattttgtgtgtgtgtgttccaatgtcaatatgtcagaaatagcaatgggtagtaacattttagaaataaagtcccactgatgattatttacccttggaaaagaaccacaagattcatcttttttctctgttatatggaagtaggtccacaagaatgtgtgtcatgaaggaatcttctggtgtatactgagaacaagaggattttgcatagattaacattttttcaagcccagtctatgtcacttgtgattgcatagacatggctcttggaggcttaacctggcatctggtcttaacatgagcagccctgctttaatctactttccactccgccaccctccatcctgacaagatagtctaattacggcagatgcagggttgtgaactgtggtttactcttcttaaaaaaaaatgacattaacattgctgtaatcatgctttagctgcatacattagagatttcttccctagagccccaaacactttgcaaatgtgatctcattaacccacatgcctaccctctgtggtaggtcggccatcttgacggcattcgggaattgaattatgcaaagagaaagtggtgtcttcagagctgcctgccagctggggatgggatcaggatgaacataaaatcttagaactttacagggccctggatattacctggtctgacatcctcaacaaataaacaggaaactgaggcctggaggggccatgctactaaactccaaggttctccacggccaaatgttaatcacctgggaagcttaaaaataatattatccaggttccactccagatcaatgtaatcgcagtctctgggacctccccacatcaatgattttaaacgctccttaggtgattctaatgaataatcatggttgagatttagctggacaacagcagacccaggagaagccccattcattcaccccagtctaggggtctgcccatggcttcactttgtcattctccaccatacagtttggtttatgacagaagttcttgaggttttaatccaggctggcatctttcatacaggaaataatcggggtaattccttggcttttcacttcatttcaccagcacaggcacattgtaaagctgtggcaacatggtgcagaagtaactgtgtgactctgccaagccagtcaatcaactggtcagttcactggacagaatcagtcaaattggttggttggctgattcagccattccggatagaatagcctgcctggttggctaagtgtggtcattactcttctagaccttgccttttacaaggaggtgtgatgatatttattttccatcataagctcagtgctagggagcactggagattctcagcatttgctctgtaaaaaaataaatgaaatgatatcctctagcattacaagcattagagattcaagagttcatcacagtgcccataggaggtgctcaataaatggtagtaattatggtgttcatattgccttgggatattgcaatgacctagactcagacccaggcagccacgcataggcatgtgcatacagacacacacacacacacacacacacacacacacacacacacagtgtaccaggatggagcatgtttttagactcggccgtttgcaaaacttagctaaagttggtggtggaaggaagaaacaaccagtctactaactcttttaccttcagaaagaagtgtcaatatagaaagtgacattggttagagaactggaaacaaaaaccataaagctctgtctgaataagaaaacaaggttacttcttaggctgtatttgaggttcagctataatgggtcccttggctcttgttccttagccctccaggttgtaaagctgaagtcctttgaccctggaatctgggattacctgtcctacagctgcagaagctcttcctgtccctttctgttctattatgacagtcagttagtcttactgaggttctttgagtctctttgctatgttcccagaaattcagtctgcatcggttgcctgtgaacctttcctaatcccttgttcaagagctgggtccttgtctagttccctccctttcgctttctcatgaatacccaagtccctatataacttctaatttctcccagacccgggagtccatcgtgcaagcaacagaaatggaaagggaaagaaagcaactgttgctcctggtctccacagcaggctgttgggatctgtctagacctctctggttttggcagctagacactcgttccttctctgacaaggaatgtcatgttaatctgtccactggaatatccctcactgcctgcctcccatgacattgtagcccttcctgtcatgacaggtgctgtggctatgtggccaggcctcgacccacctcacgaagcactcagcgagttatcactatgctccttaatctaaccagctgtactacagccagatggctggataagctaagacaagttcgtttgttgtccttatagacaggtcataggctaaagagcagacagaggctgtgaggtacatctcttagcaattgtgatcactgcttgtttcaagaaacttttttttgcctttatacaaatccctggtgtctgctgcaaatgatgatgtgttttcatttccatgactatgtctatgtgccacacctaaccaatatttccatatactaacactttgaattaaggtgtaggttctaatctcacttgaatggaattcatgttcacagaagaataccaaagattattggtgattttgattccattcttctttggttgggacatttggttgggatgtaggtcatttggtcccacccacattttcagcatcatttcttcttcttccttggaggaccacttaaatattctcccttacttaacccaccctactgtcttacagcctcttatctgcatacttactgcttcctctctacagactgtctttttctcattctcttcctggctaactctgactcattttctaaaatctgacccacgaatgtatcagctcccttgtaaagccttcctgggctactctctttccctatgcatacgtcccatggaccgcttgtcatattgctgtgagctccaaggaaaagcctgtgcattgtttatcttcacatacatgatgtgtgtagtatgagtccagtaagtgctttggtgccagtgtatacatttaactgcaaattaataaacactggccttggattgccctttgtgacttttggctcagtcatagaaaaacattaagtagcttaaggaataaagccctaattaattcatctttgtatcccctacccagcacccagcactgtgtctcggacatagtaagtacatgtattctagatgaacaatcactagatagattattgcagtgctaatgtgccttgcctaaaaatggtatttgcttgggttagatcgaacctgatgtgaaacatgtatgaaattggacttcaagaggcttctttctgttgagggggcttccattccctttcaaaaaactcccagggaaggccgggcatggtggctcatgcctgtaatcccagcactttgggaggccaaggcgggcagatcacgaggtcaggagatcgagaccatcctggctaacatggtgaaaccctgtctttactaaaaatacaaaaaattagccaggcgtggtggtggttgcctatagtcccagctactcgggaggctgaggcaggagaatcgcttgaacctaggaggtaggtagaggttgcaatgagtcaagattgtgctgttgcactccagcctgggctacagagcaacactccatctcaaaacaaacaaacaaacaaaacaaacaaacaaaaaaaactcccagggaaatcctcagaacatttgtctatgtaaactcaataagcagagtgaatacaagggaacttttcattagcatttattttccacctggactttgggctcccacaactgagactctgacctcctacagtcggggactacattattcaccttttccttgcctcacccagcacagtacacaattggtgctttataaatgtttactgagggagtggccacgtggtgatctctacacaactcctggaagccctccagcaccgtcgctcttaacacacatctaggtataacattgattgctgcggatgccatttcctttctaggagaagttatttgttcaagtgcaacttgctggcctttgcattgtcctctgaaaagaatccctgatggctgtgcagaggctttagttaaatggaataagatggtttccattttcatatagttagagagtgccactcatgttggctgatgagtgctggttagggctatgggaggatctcctatccttctcgggttctatagacatttcagataatataagggaaagaaacgaaaagactggatgggaaaaggaagaaaaaaactaacctaggcaaagaaaatgaatacaagaaaactccaagggacgtgaaaatcggtagcattcgtcattaaaaggggaacgtcaatcatccttagtctcgttttttcttcattgtgtgcctgagtgaaggcgaaaatggaaatgacaatggcgaaaactttttaaagccactttatccaggaacagtgaataagaaagatatttagttccaaccttgcagagagggtaatgtgtgtgtgtgtgtgtgtgtgtgtgtgtgtgtgtgtgtgtgtgtgtatactcaaaaacatttccccctatgtaaatgatattccccctgaatctctcctgtgcttcctgataccaagggaatgaaagataggggagcagtcagaagtcacagagagtttgctgacgggaggccgggggtggggggtggtgagggtcagtagtgtggtagtggtctgtggctttggggcttatactaaattaattttcccactgcaggattcattttcaaccccatctactttctttcttggtctcagccttgcagcctgcacacatttgtatgctttgcttcttgttttacgcatttttgcaagtcacatggacttatgcccatgtaactcacctctgttaatgcaaggttgtgtgaaaggttgtggacaaatggaacttttgtaaatcgaatcatctttcagatgtatttgggagctttctatttaacagaaggtaggcttgagtcttgggcaaaatgaaaaagacttcagcaatctcactcacattccagtttgtttcttctgaaaggtaattttgtgtttttatcgccaattttcttaaagctgagtctggttttcctgaagcaacaactgtgtgcctgctgtttgcaggatatcggtatgttctgctgaaatggctcccacctccccactcccctcatatataccaggaagtgcctgggacagaactgtcctctgcttgtgtctaactccttgtacccatgagcttacgtgcaccaggatatcagcagtgcttagaggcaggtaggggagagagggcagagtcctgtgagaaatctgtggccagagtgtaggcccagctctccggatgtctaagccagtacttgtccctctttttgctatgctgtcccccacagcaggatccatcctgaaaagggatacttcttgtcagtggttcagggcagctcgacttgatcctcccttctgtgtcagaggcacattcaaaactgctggtggaaggagatactgcctctgtggatttctcgtaggtcttctagttgagccatgctttataaactaaagcagaagagagcactgcatctcttgctaaacaacagggagaatggtttaggaggcactataacgtaataacatagtgcaaaggctaggttggattcctgggttcaatcatagcttcaaataattagcagtctgaacttggatcagttctttgttgttgttgttgttgttgtttttgttgttgttgttgttgagacggaggtcttgctctgtcacccagcctggaatgcaatggtatgatctcggttcactgcaacctctgcctcctgggttcaagcgattcttctgctcagtctcccaagtagctgggattacaggtgcctgccaccacacctggctaatttttgtacttttagtagagacagggttttgccacattggccaggctggtcttgaactcctgacctcaagtgatctgcccgcctcagccttccaaagtgctgggattacaggcgtgagccactgtgcccagcctggaccagttctttaactccactcaacctcaatttcttcacctatgagacagatgtgttcctaccagcctcagaaaactgtgaatattatagaaaatgtatatgcagcatgataggtgctagataaagagaaactctcgtcattcatgtttattagcactaaagttcctttcatcccatctttgtcttgttgtctactttgtctacactttcattttctgttatacttctcttgtggtttcctaaagacattttcttagttctatctccttgctccctcatttctttctttcttcttctgtctccctctcttttctctctctctctgtctctgtctcgctctctcgttgtctcgctctctcatatctaatatcatggcattcctgttctttcttctatataagaattacaacatttcaaagctgaagtagcccttggagtttctcagttctagctcctatgtgtgagatgagacaactgatgcccagggaaattaacatcttacacacgactgccacttggtggaatcctggaggactgggatgggtgctcaggccacctgctccgtaacaacactttgtccctgggggtgaccgtgggagggagggtcctctatccccagggaacccagtgaggacagggatgttacagttctttgtctccctaaagggtagtgtttttcctgtgtcctttcgaactcctcgggagcactttatatttcaaagctttttgataaaacagctaaaccaactcctctcctgggacagcaaaactcagtagagatttctcacaaaattctcttattgttggactggactgaggatatttttaatttttttcttgcaatcaaaaaaatttacagtcactcagcatggatagtacatcatgaatgggcagttgtgggtctttgatctaatttttatgtgtctgatttctcaataataaatgggcttttgttaggagacaggttgacacttactgagtttgctctttatgggtctgtagtgagttgggagccacctgtggatgtgttctcttttcttggtcctacagcaaaactgtgacttgacacataattgaacattgttgcctaggccctttcagtattccaggcatttgaaaagagagaaaactgtgttccatccaagagaatagcatcgaagctaaatgtcaggtgacaatttagcatagttgtgactgatatgatccatcacaaaggggggaagaactattgattatgatgtagatgagagaaaaacacatcccagagacaaaagtaggaaaaagcgaagagcccgtaatgtaaccagttgtctttaagtcactgcccttgaggaatgacaaacgccttgcactggctcagatttctttgaacagcctagaaacagaacacaacactgctaccatcgcaggcaggagttatgttaaagaaagatgttttgagtaatgttcatgaacagcaaaatggctcacacaacaggacatccttctagaatatggtcagagggcattctgcaaaagggcctgagaatgaggactggggaagaggaactggcataaacatgtcaagaaggctcatttgtctatactcttgaaaggtgagatgagaggcagaggcacacagaaggctggctctggggaatgataatggcatttgaagcttttcacttctgtgtaggtcactggctcacttcaaagcctaactgctcgaaatggttactgcttgatggctgatgggaaattaggtcctggctttcaatctgcctcctaaaggtattccctgggaattggtctcccttcctggaagactgacaaaggctgggaaaggcaacaggtacataactgttctgacgccagaggggatcttgctggagtggggcggggttaacgctggccaggcacaggagagggaaggccgcgaggggctagtgatggtggtgaatgggtgcggggcaccaaagaagaaaatgctttattcctgcagcccctggaagtgtgagggctgcaggaatcctggggccaccagtgggctgaccagcttggggaccatagacagcaagttggatggagtcccatgaagaaactcatgcctggctccagagggcacagtcctccttataaacccacaggtctcttcaccctacctctctctgatccacctctggctccctgactccagagaatccttgtctaatctcagggcaggcaaggctgattgatgggctgtgttccaaatctcttacttaagactcttgcaaagcaatttagctcttagaattaaacaacatttttgtgtttctattattgtcccccctcccctgaggcaatgacatgaggaagagatagggtaagcagataaggggaaatctatggaataaaaagcacctcagttaatatctccaactgtcaatcctgctatacttccctacttgtttttcttttgacactaacttgactcctgggcttttgaagcttgcactcaggctgtcggggcgaccactgtgggcccagttctttctgtctagaggaaactccctgtgggcagttcatacacccaaaagctgtgagaaggtttattttgtgtcgtaggacaggttagcagaggacaggagacaaagaagacagcccatggagaatttggctagagaaattctctcctgatcccccagctttttctcttgcaaaacaggaggtatgagtgtgttgcactcaatgatgagctactactttatggcttacaacctttcagacacaggtttaggagatgagaaaaacctcagtaccgttcatcacccatcataggcatgcagtgtcatttttatgtgggtgagacagattctttgtttgcttcgcacattgtaatgatttgatgtcactttgcaggtgatctgtttcttaaaaagtgtgcctattgcattggctgtgtgattgcaggcatgttctctctccttcctggaggtggggagccttttggtgacatgcaaggcccatgcaaggaggatggggaaactggcacactagacctatcagtaagcctgggagaagcccagaagagtggtttccattggtctctggaatacagagatttgtgtaaaagcttaaaggctggggtacagttctttgagggaatcgccctgccaaggtagagggtgggatagaaaacaaagatggtgttctctggaacaagctgctgcctccacagccctgacagatgttgagcagccttcatgctctgtctggatagtaagtgggtgtcttttaaatatttgtgtgtaagtttctctctcactaccccttgaactccctgggggcaatgtctgaatcatctttgttctgtttattcttggaagcttccagacatatagaaggtgcacagaaaatccttgttatcagaatgaatgaaaggggagagtgaagcccagggtagttctttcttttctgaggatgatgtttgaatgccttggcatattttaatccattcctacctgaccttttctttaaactacacttaggcctctagaaagtcatcaaagaacattttgctgaagagctgaggaactgatcttaaaaaattagagcttaggtttccatataatgataaagtcagagcttcatcaactgaaaagatgctagaaagatttggagacactctcgccagtatcatcttccttaaccagcatgggctttttgctgtggcatctgttaccccgaaacgccatgggttgtgctaacgtagcccgtcaagttcagtggagggcgctgctcagatatccctaaggtgttcagggcttagctctcccaacctggattcctcctgtgcattcctgactccatttgaccctgtcatgttgcagttaggcccgatcaataatcttttaaaataagctttgccctttgaaaactagccctaagcactttgcattcctttctgtttgaaaagttcagttttgttccatgctcagttctaaaaataccctagagaggtgggaggcccacgccatgcagttcaaagctgctccagtgggtgagggtcttcagggcttggcaatgagctcacttgggtgaatttatcaccttcacactttccggaaatgggctcccttagagacaaaataggaaagtgagcattctgtcccctggcaatctcaggtccatggacaggagggctctgtgctcggaagatgaggcaggcaccaagaccctgagggttgctgaagagcctgagttgaaaatggccctcaaaaattttgttttcaagatgaatgcagtgtgtagacactattgactgcaggtcgattgataatcttcagtctgcgtttttgagagcacctgtagagatccagagtcaatactcactgtgtttggggctgggatgcttggtccacaatgatgctggttatttggttctcagcattcccaagatcaaggaatcttgtcccaaagccccataaatgtaagacagtttcctggtgtcagtgaagtaatacatttgttccctttgcctataattgtcccaaagtggctagcagaggtctaatctctgtttttactcgatgtccttggagaatgaaggcacaatgagatataggctgttcaagcactgagctttttacactctgtttatctgattcttctctctaattaaagttaccttctatacttgattggtttttaaagcccaatatttggcaattaaaccttctttattctaacaactgtgtgacatttccctgagtgatttagcacatgatatattatctgcagaaccaaagactggcttccttggggagcttcttttgcagaatttgatgtcaggtgacttctctaaacatccaccgagcattctgcagagagaatgatgcagactctattcaggagtccgtattgctggtgaagagagagccttggcttgaattcggactcaggagaccccatttaatccccaaatgaagctacttttctaaagccccctcgaggtatttgaaagtgcacacctttttatctgtgtctgttcattataaccaaggaagcatgaagggtgtccttggagaagccagcctgtgcccaccataacagcagtttagcccactcagcccaggccccaggtggggtgctagaggctcttggagcacagagcgcttccaaatagggctgtctgatacaccaggagcaaattatttcgacttaacccttcctagaggcctagtaaaaccacctcaaggttttctttctcttttttttgtttttttgttttttttttagacggcgtcttgctctgtcactcaggttggagtgcagtggcacgatctcggctcactgcaagctccgcctcccaggttcctgccattctcctgcctcagcctcccaagtagctgggactacaggcgcccgccaccacgcccggctaattttttgtattttttagtagagaccgggtttcaccatgttagccaggatggtctcgatctcctgacctcgtgatctgcttgcctcagcctcccaaagtgctgggattacaggcgtgagccaccgcacccggccttaaggttttctttattccattttctctcagacaggaaaacccgtggcaggacgcacggggggttcagcaggcacagacattgtaatacagcccctcccctttccttataagagtggatcctatttcctattcaggtttgttcaatttttgatggacagagttgtagtgttgccttttctaggccataggaaactttcagctgccataggaatgagggtgcgaagcagatagcagccactgcacagaaaaagcatcagtgtgctcaatacttcctccccacctcactcctgctgcacacacacttgcacacatgcatgcacgtgtatgtatgtacacacacatacacacacgatgcctgcacccacgcatgatggcggccaacctgaaccatctaggaatgcacacagaactccacctcctgctctgttgggaagtcatcttctccaaatttagcatttgaaccgaaatttagtctgtgaccatgacccttccttggagcctggtccaaccacataggcattctttatttgtttgagagtgttttcagtcttttatcctcacatatgaggtcagagtgatgctgaagggaggttaaatcactgccatcaacagcattggattcgcttagaggtgattaactctgccacctgccaccaaggactgcagagcgcatcctaatgcctttgtgtttcctgtgctgtgaatgcaaatgattttagggggtttctcctagacttgttgtcctgtcctgaggactcccctggggaggataactggagctattgaagacccgctgtagtaattctggtgtgtttgtaagcttcctcagcaataattccctacctggagctgaggtgtccccctgctacctggagtacttttgcatctgagcatcactgtttttgccaggtggaaggctggactggtgtattgggatggctcagaaagcaagggcctgcaggaataatccctgagactattgatctgggaacttctggctgagatcgttctggggtgagctcacaggcttgggcagtcagagctagaaagggttctagtgcctccttacttaaagtgtggcctgaggaccagaaatagcatcatcttggagcttggcagaacatagcaccttagaccccatcctagacattctgagttcaaatctgcatttgaacaagattctcaggtgatctgtaggtatgttccagtaaacagccagtcagtctgtccctcatcttatgagatattcttttgactgtccttctgagatacattgcaccaagaaaatgcccacatggggaagagaaagccagccagtcagcgagaagttgctgcatgaatttctgactcaggtttctgggtggtagaagaccctaggtacctagcaataagcaaaatagatggatggcaagaggggatgtagagagaaggtctgcacaaacttcaccttctctgacattcacttctcttcttcttccctacaaactagctgccagtgactcactgtcaggtgacctcagccagtgactcgtaggctgggtgatgatttcaagagaccctggtctctaagaaggtcatgatgtaccctttttcctactcctgccatagaatcaaaaataaaataatagtacattgcaaaataggttattaaaaatctaataggattctgattttctcctggatgaatattttgattcttgctttaaaatagcaaatgctagtttagtgtatgagcccctgatgccctccctaagcacatactcagcttcccactgggtgccaggccctgcccttgctgtagtttgaggagacacattcttgagactagatgaggaaaatcccgactccatggccccctaccaattacagagctagttgatggtagattgggggtcagaacccttgtttctggggttccacctggattcttaggtcacaagtagtcctggttcacctgggcaaggtggtatcctgaaggaatcctgaaattttcttagcttctaggacttgacgtgaactaagacttggggtttgggcttgttttttctttttcttttttctttcttttgtttttttgagacagggtcttgctctgttgcccaggctgaagtgcagtggtacaatcatagcttactgcagacttgacctcccaggctcaagcaatcttcccacctcagcctcctgagtagttgggattacaggcataagccaccatgcccagcaaaatcaggacttgttttgagtttatccatatcttagcctccgggagctaatgagaaacagatctgactcagatttgaaataagctaactatacattcaaccaccatcatttcactcccatttgccatgagcgagagggacaaattagccctctgaccaaagtggtgcaggaggtcagagtggatcagagagaagctgccctcccaaaggctgttttcaaactatcgtctgccactgtttcttgctcaacgctgaatcaaggttaggattggaaggaatgaggagggggtttaccattgctgttttttacttttaaattgatttttgatgaacagccttctctcttatgcctaaatagccagtttaatcatcacaatgtcttgtgggagtaagaagcttctttttttttttttttttttttttttaacaaaattccattgcattttcttagcgtagttacagttccatattagggttacatatgtcatgcttcttccaggaaggtctgaatataattaagccttgtgctgtgcctcacatcatgccttgcaaggagaaggtgatcaacattatgtctgattcagcaaaaggcttgtagtaccatcaataacatggtttgctgcttcaaaagtggcaatcagaaaagtctctctccatcactgccttccagatgttaccctagtatacctgggagtttcctgggttatgtcatgtgactttttcaaaatgctcaagaatgtgtgaaataccccatggtgccctgacctttatgattctccttcactgcaatacttactaaaactttaaactacagtcattgatcattctactatccactgggtggttactatccattgccagccctgtgctaaccactttacttatattaatcctcacaataggctatggacaggtacaattactatccccattttacagattaagtaactttcccaaggtcacccagctagtaaatggggaagcagggatttttacccaaagaagtctgtctagaagagtccaagtgattaactaagcactgccctaaaggtataaacagagagacccattctctcttttgatttctgcttttgtttttgtttttttttttttgtagggggagggagtccactccgatcctacatggtggaacaggtttctgactatgaggaaaagctttggggtataacatctaaggcttcattcatgtggtatgcagttatttaggagggatttccttctaccctggtggcatgacaatctccaattcctttggttagcaaaataacaagactgtcaggtgttttgttagcagaaattatggacttcagtgaaacatttctctgactttccagttaaagaatggtttgctcagagttaaccaagacctgagagttggaagggaatttaaaggcccttttgttcaaatccccatctaattcatggctccttttataaccttccactgagcataatgttgtattttggtttatcttttagtcagtcaaaggggaccttgtgcttattgacactttcaatgattaaaataagaattctttttatttggtcttattctgaatctttaacctggatttcttgtctccatcttttctccccttaggccctatttgtctgcttaacatgagcatctgggttaactatatccacaaagaaatctattcttttaattatagaatgaacaactatataaatttacattaacccatccccgattcagaattttagaatcatcccttttggtaactcttcggtgaagtttgtttcagctactaattttttttcttggaagtagttacgtcatccattttcaaaaagaagtcatatgtactcaacagaaactctttaattacgggtgtcagtatccatctttgtctggtctagagtggtgcctttcgcattctactggaaggaatttctcaggcgcatggcattgtatttttacctcctaggcccacctcacagtccaaatgtcagcactttatggaaagagaactgggctcaaagccaaaacaactgagtgagtcccaggttggattctgccctaggaccttggtcaaggcattaacctttgggaatcctggtttcttcttgagaaaatagccactctgccagctctgcccttgtcataaggttgttgagaggctcaaaacagagatgtatgtcagagcacttagtaaactgtaacatggtatggcaataggaggtcaaagcactgggttcccagaatgattacgatgtgggtatgtgggaaccagagaacaagaaagccccacagcttcaaccccacagtggattcttgtccttctagagtgagtgtctgcagatgtcttggcaggggagggtggttggaattaagttgcctcagagattaacgttcctgtcagtcagaaatgtgtcagtcagggagtttcaaagcaacaggggggagagaatgagctgacagtcatttgtaaaaatttaatgagcactaattaagcatcctgtttgtaaatagcaccaaagatagcattatataaatgccaacctggaccgtttttgggaagtggcattaggcacaggtgagctgctctggttagcactgtgccttgcctgcaacagctctgagcatcgatgggcaagggtcttatttatatcttttagaacttttccacaacagactagctctccattgaatattatcttatcaaattatgtttttctcaagattttgataaatctggcaccatcccagttctaagaccttctcttgaaagaagccttcacattaaagacgtcttcagagatcctcttccttctccttgttcccttcacgattctaaattaatctcttcctctttgaagtcttattttttatgatgcgttttaaaaagaatagaatttcatagggaagttgatgaaacaaaattcagccaaaaatgcatttagcacttaatgccataaatatttcagttgtctttcccatcatccatctcaatggatggatgttttacttatatttgtctgaaaaataatgattctgtcagttatcaataatctttaactttatgctaaagaaactcatcattatctaatgagttttgccctttgcggtcatcagtgccagtgtccttggaggaaactcaccaaaactgaagtcagtcgagtcagacctgagacttaaagacctaaaagcagagacttcctctatcctggtagcaacaagtaaagaggggaagagagaggtcacttcctagaacagagggcccctgaaagattgttttggccaattctctgtttctacataggatttctcattcctcattcctgagcaattgcttataggtacactggtgtgctggtaagtgttgaacaactagttctctaaaaagaaaaaaatgtgtgtgtgtgtgtgtgtgtacatttactgtgtattttactgatagaaaagatgtgtagtgtacaatttacaaataataaaatattcttttttgaaaattccaatggattctcacagaatgcttttgttgattttaccaaaatttgtattaatagtcaacatatggttgtaattaacaaatgagtatagttccaacatcaatgttggttggtgtttttgtttacattgacaagcaagacaacagtgaaacaacaaagataaatgtgggaactccagcacgtcgttccacaaatcccattttcctagagttctgaggaggaagaagtcattccccctacacagaagtccttgtgttgcatggtaagccagtcctctgctttgatcatgagaccaggtaggaaaatattatcaagacctgtaagaggctggggcacttgaagaactgagattcattctttctttaagttctaacatgttatcaaattttatacatgcccattgtttaaaaaagcaaatagtgtataaggcttgtcgtgaaaaacagtagtcctctaccccttaccctccatctcctctcagcagcgagacgccctttaactctttcagctgttttaggggggcatacagctagacttctgtaaataatacacttgtgttgctgtttcttgatttgccattttaaaccctttccatggaattcccactatggtgaggaagtgtgggaggcgaggaattggttcactccactcgcattctccaccccacccctgcatctgcatatgtgccaagacatgcctttaatttctcttcactcttccaatagagctaaattttaatttcattcaaatcaatattcagtgtttatattatatagcaatgcaaatgatattcatgactaagcctttatttttcctttcatgaaccatcttttattttccctagaggttttgctttgtttttgttttgctttgtttgatatttacatttagattatattatgtccttttatattagcttagtttcctctgattgtatcactgtgtcaacctcagactctgccagttgtctgtatttctaatccaagtatcagaagcctctgccatcccaccaatctcatcttcaagaaatctctcctggagccctcttccctgctcccatctgggtgggttgtcctctggcatcctgggccctgccatctgcctcatctcgggaattctctttatctggctgccctgtgggttagacctctgtcttttagtgtccaaatggtactggctggtactgaaggagcccctcctcagtcagcttcctgagaaagagtgcagaggagataagacatttgaggccctgcttatctgacaaatccattattttaccttcatatttggtagtttctctgggtatagaattccagggtgcaggctgggcgcagtggctcatgcctgtaatcccagcactttgggaggtcgaggcgggcggatcacgaggtcaggcaatcgagaccatcctggctaacacggtgaaaccccgtctctactaaaaatacaaaaaattagcggggcatggtggcaggcgcctgtagtcccagctactcgggaggctgaggcaggagaatggtatgaacccgggaggtggagcttacagtgagtcgagatcgtgacactgcactccagcctgggcgacagagtgagactcagctcccccaacccaaaaaaaaaagagaagaattccagggtgcaagtcatagcccttcagattttggaagacatcactccattgttttctggtctctggtattactattgagaagttcaaagccattcagactcatcatctttggaaggggtatgttttatctttctctgtctagaagcttgtttgattagaacttgtcctatgtactctaaaatttcatgacactgtgttatggtttgagtttatttcatttgtcttgcagtatgaactcctttaatctagaaattcaagtcttttggtttagggacatttttttgaattgttttgtggttaattttctttcctcctttgtgtgtgtgtgtatttgtgtacgtgtgcatatatgtgtgtatttgtgtatgtatgcatctatgtctgtgtgtgtatttgcctatgtatgtgtgcatgtatgtgtacgtgtgtatttttctgtgtatgtgtgcatgtctgtgttaatgcttgtctgtgtatgtgtgcatgtatgtgtttgtgtttgtgtgtatttgtgtatgtgtgcatgtgtgtgtctgtgtttctgtgtatgtctgtgtatttgtgtatgtgtgtgtttctgtgtgtctatgtgtgtgtgactgcgtgtgtgtgactgtgtgtgagactgtgtgtgtggctgtgtgcatgtgtgtgactgtgagactgtgtgtgtgactgtgtgtctgtgcgtgttctctttctggcactctcattatttacatgctgggcatcctggactggtgatttgcttttcttatatttcctgtcctattttctatctctttatcttataaccctctgttgacttttcccatttctactataatctttttaatttcaccagtcttgttttgctatcataatttttttatattatccagctctggttttcacaaatgtaatttatcttcttttaaatctctcagcatattaaatatattctgaatataaaatgtttttcttacataattcttatttggttgcttttatcccgtttgcttgatttgattgccatatttaaactcagagatttccctcagatgtctgtcaacactagtttctgctcttagtaagagtaggacactagaatgctgtttggaagccctgagcttgttgttgggacgtgtcatctgtaggcttcagtgtagggtgtgactggacgactttgttagagaatcttgtggtcagtacctttaggtctttccttttgagcttttcaaatccccttggaaaagctctcctagttacctgcttagaggtataggcctagtggccatgattctggcaatccaatggggaaagagtttggagatctcggcattttggatacaaaaactcactccttcctacacttggtagtttaccctcctcctctaactgtgcctggtgtccctggaccgggagtctccatttctccaattccagatagtaaagaagcctttggtctcttgctggatatgggaaggggatttgtggatccagctgcttcttgaatgaactttcatcaaggcttctttgcttagtttctcgtccctcccaccaacactcctagagatagcacaatcaatgcctaatcctttttaggagttctgggaaaatagggctgctgctaggcctccacactatcagttgcggatgcagctttctgatcactgttcaatcaattggctatcagtctagtcatccatttgctgcccagtatctaaaccgctgttgctgttgtttgcttgcttattttctttacccttgcacattaatgccccctttcctcctgtagcatctcgatgcacatttatttcatgtcacgtttttgtgttatcgttcattgtaaatctgtctgatcactcctctaaagagggaacacctctgaaggaagcgatgcatccacatgcttaatagttctcagtactcagcaggggaagatcactatgtgctgaagtgtgactaccctgaggtctgttcagtagccgagccaggcctggggctaggtgctgaggctcagatactggtgcactcgtctgtgccctcaaggagcttataggtgggtgctgttttctcctgtccaaccacagggagccaacttctgcctgttgacatcttggtggctaaagaaagaagtgatggctgtaatcgtgagctttccttactctctatttgtcatgaaaaaagacacagaaaaaagtgaaagtcagcctagaaatgaagagacacgtcattctacagactgatgggaaaaatagggctggggaaagatggaagtcaagagactccaacccctttccatatacttctttgccttctttaataggaaatactgtttcataatttcaaaagtaataccagctcaatgtgggaaatttgagagataaagagaactatgaagaaaaaatttagccagatgctgtggctcacacctgtaatcccagcactttgggaggacgaggtgggtggatcacttgagcccagcagttcaagaccagcctaggtaacatgataaaaccctatctgtataaaaaatgcaaaaattagctgggcatggtggtgtgcacctgtagtcacagctacttgggaagctgaggcgggaggatcgcttgagcccaggaagtcaaggctgcagtgagctgtgattgtgctcctgcactccagcctgggtgacagagtgagaccctgtcttaaaaaaaaaagataaaaaggataaagaaaaaatttaaagttactgttaaccagaccacttttaacattttattataaatatttgcttataggcacatatacatatatacacacacacacacacacacacacacacacagacatatataatttaataaaattataattttgttaaactatacctcctcttatagtttagatatcaagtaattattttttattgattttaattacctggtcaaattttgtccattttaatattttgagatttatcatttttaattaagaactttatataccaatataatggaactttgttgtatcttttccatcagtgtattattttccttttttacttgtattttgacatcttctgacatatggaaattagtattagatttttatgcaatcaaggctatctgtctttctttgcaatgttttcttgctttataccaagaaagtatactgagtagatttcctgaggtggattccctggggaggtttatttctcaaaaagccatcagctctccctgaagttgtttaattaccatttactgggcccccgtttacccagaattctaaggctggctcagatagaagatgtggattgggctttttagagctccagctctgctaaatctgtttattgtcccgtttgccactttcacaaagaggatgggcatgctcactgcaagcagagccagcgacgtggccacagctgtcatcagatctctaagccatgaaaattccctgggagcctcttgggatactccagccgatatccaccttcatttgaaactcctaggatgctccccagaagactcactaagacaagaaatagcaaagactgttctaggcaccaactgtcacccggacagtaacaagtcatttttcttcccttgtagctacctaatgagtaatcatcacgacttccccagactggggctagaagacaaacaatgttccttggagttatgtcctttcatcttgcctgtttgacatccctgttgacaggacacaagatgccaggccagatggcgccaggcacattatacagatgagtggcagcagtccaggtgtgccaggcagggggaggaggcaggggagaaactgggcatttcatcactggagtgtactataaagaacatgtccagctggggtctgtctcttcttgagagcctgagtgactgatgtcccaaacagattccaaaatgcctatttcactaagggcccgggaaaatgaatacacgcatcctaatgactgtatcttccattaggccctccatgaagtgagaaagtaggacatatgtttgtgatggaaagagcactatgccaggagccagaggccctgagttctatgccttcataggatgaccagccatcctggttttccagggactgatgggtttcctgggacatgagatttttcatttttaaaatcacaacggtcctgggaaaactgggatgatctccttttctaggtatttgaccttgactgtgtcatttatcctgctgagcccccatctcttgacatttatccctgctctgcctttaaaaagttgcagtaaacattaggaaggtattgggagacagagttaaaagttgtgtgaccttgatcaagtaacttggcctgtttaagcttgatcttcttactaatgaacacttcatcagattgttgtgagaatcaaatgaaaagtaaaaattatatgtaaactcctgatcacagtgcctggtgcatagtaggtcctattaaaagttataaatagctgtggttcctattttgtagtacattgccaaaactagatgtcattgtcactgtaagagattttggagttaagaaagtcaactctgccctctttgggttggattgctgtttttccagagaggggccaggtggagcctcagaaggctggggtgttccacagcttctagaagagccttttggaggtcaggctctgggaaagtgaggagatacactcagaagctgtcagcactggtctccttttctcctggacatgggtttcaggtctgtcagggacactttcatgctttctgtcagaaagtaaatcatgcagaggatggcaggtggaaaagtacataaaggattatattcaacaatcatttattaagcttcagctttgctccaggcctgatactagttactatgcatatgaagatgaggaagactcattcttaccatatcctcaaagggttatggtcctgctgagtagacagatcaacatagatttagatcacagatatttgtttagatgccataacagaggtgtctgtgcaatgctgggagacccaggggaaatattcactgcctagggtatgtcttgatgaatgaacaggaggtggtggggaagagaaggaggtttcagagactggggagtcaatactcaaatatgtgaggcaaatatgtttgtattgagaacatggggtgattcatggtggctgggggagagaaaggagctatgctgtgtaagaataaatgccaggcttgtaggactggaagatcctaagcagcctgaagggttctgaacaaccccgtgaaggagttgggatttgtggtggtgcaaaaggatccataccagatgtttaagaaggaggcaagaaccagatttctgaattggaactattgctgtgtccacacagatctgtttgtaattatgttcataatagcattgtttataccagcaaaaatcataatgtttatgtggattctgttgagttaattatgcattgatacaacaaaatactgtacagctaattaaaattatattagtgatatatattcattggcatgaaaagactttaaagagtgtgttacaaagcaagacaaagcatttccacatttcacttcaaattatatatgagttttacagtggtgcactgcagccagctcacataagctcgcaagatctgatttgctagcatctctttccaagtccatgttcagtgatatcatgttggtagcatgaaataagccaagtggaagtatttattatggaaattgccaaatactacaaataagggcttaaaaaaacagagagcttgttaaacatctcccagcccaccactgtgtatatataaatattaagagaaaaacctgagcactacttgttgatgagattagaggttatttctttgctcatttgtattttccaagtttttaaaattgacatgcatttttaaatttaaatttaaaaaaaaaggtactctttttttattctaaaagcgccaggcatggtggcttatgcctgtaatcccagcattttgggaggacgagaccaaaggatcacttgagcccacgagtttgagaccagcctgggcaacgtagtgggaccctgtttctgcaaaataaaaaataaataaaaagaaaaataaaagcaagctcactctgatagcagcatcatgatgagggatgggagcagaggtatcaattaggagatcacttaatccaacaatcctggagagagctcatgagaagctgggatagggcagtgagaaaatgaaggaaggggagaattaccataagaggccactctatatacttcaaaactttcgatcattttcaggtgagaaagtcatggagaatgaatacttgggcaatgctttcacagaactgtattagtccattctcacattgctttgaagaaagacctgagggtgggtaatttataaataaaataggtttaattggctcatagttctacaggatatacaagaagcatattggcttctgcttctggggaggcctcaggaaacttataatcatagcagaaagcaaaggggaagcaggcacgtcatatgtggccagagcagaagcaagagagagagagaaggaggtgccacccacctttctaaaccaccagatctcacgagaactcactcactagcatgagaacagcaccatcgggagatctgcccccttgatccaatcacctccaactaggtcccacctccaacatttggaattacagtttgacatgagatttgggtggggacacaaatccaaatcatatcaataaccaacagaaggacaaccagaaacagatttcatgaaaatggggcatccaaggattttaacatgatatagcaaccttaaatttaaatcctcttgcaaccttattattattgaagctgatgacataaaccaaaatgactggacttgaatgtctttgcttttgggagtccctgcccaccctaatgggatatattaagccagtgacagaacaacataagcaggcaagatccattattttcatatatgtagtgactctcacagtgcctggccccaagtgtgtgctctaagaatgtttgatgaatgaagaaataaaaggtgaggcttcctcagtggtgtgccggtaaatgttgaagaactattttcctgatttgggacgttcactgatatttgtggtgtaaatactcctaccatggccaattttaagctgtaagtgtggtcaccaaacttgggatgaggtgaggacaatggggtcttgggagcctctaggagaggatccagcatacaactagaccacttggtactcagggaccacccccaggcacctctctggctggacccaccctccccacaatcacttggagagctctactcagacagccctgcagtcaacccagggcctcagcctgacccttggacacatgtaatgaatgccatggtccttgaattgcatcctggtaacatgaggggattgaccccaaatagggactgcactggtaacaatgggttagggttgaaggaaatctggattctggttctgggtgaccacaggaggtcacaggatgtctctgagggtttgtcctcttgcctgtgtcttggagatagtgatctccacctccccaggtggctgtgagagcagaataaacagggtgttacgagagggagtttcaaagatccctgaaagttggtgtggggccctgaagaaggctgtttctttctctacccctttctttctcctcccctctgcatttccctctattggcctgggctctattgtgtgtgaacaggagccaagtcacctttcagtgccctagggttaggggacatgagttaaggtttcaggaatctcaggggcctcagacaaatcataactaagtgtggagcactaccctcaaagctgataggaaaggggcagcgggacagcaccctcaatcctcgctatagcctgtgacctgccaggcaggcactctagtttcccttcagcagaggtgcatgagctcctcaagaggcagctgggtctccagtggcccataaatgtgggggctgagcctggtttaatggggaagcacttaatttcctgatttatgaggcactcgttatttttattaactgtcctattttattaggcctcattcatggactgagaaaatccttattcttacagttctaaatgccaagttctccatccaggcagaaagatccttagaggtcacatatctggtaaaaagctagctctcaaagtgactagaaggagaatgttggcatttataatgattataataatgctatttaggtgtctacctacgggcctcattctatactgataccatgcatttcatgtactcctcaaagcaaccctacatgatagatactattattctcattgtacagatgaagaaattgaggtctggcaaaggtttacaactcgaccaatgtcacacagctagaaagtggtggcacaagacccatacccaggtcatctgacttcagagtcctattttttttttttttttttttttgagatggagtctcactctgtcgcctaggctcgagtgcagtggcgcgatctcggctcactgcaacctccgcctccctggttcaagcgattctcctgcctcagcctcctgagtagataggactataggcatacatcaccacgctcagctaatttttgtatttttagtagagatggggtttcaccatgttggccaggatggtctctatctcttgacctcgtgatccgcccgcctcggcctctcaaagtgctgggattacagtcgtgagccactgcgcccagccaatccctttcttttaaagaggccctgccatagatgcttggaactagaaagggacttaaagtctctcctctaacctccttgcatggctgcaacatcttagctggttgcttaagcttcccttatcctcatttcctcttctgttctgtagttcagagccacatatgtctatgtctctaagagctgctacattttaagagctaacttcacttcagccataactgagtcctaccaaccccttattatcatatttttcctctgctgagacatggatctggtataatgatttcctcttgtcagatggaccaagggctacaagttgttccacaatatatactcacggggagactgcaaaacgcaaccctctgcgcagctattaaaataacctcccctctgtaatggattagttatttcagcaacgagacccatttgaagggagatcatgagataattgactgtcaaacagttgaacaatgttaaggtcaattgtagtggaggtcaattcgtttgaacaatgggcctgcttctgacaggcttcataatgttgataataataactttggtttaatggaagtgttcagtggtgttagagaagaatgaactattagatgttcagattaagtattgtctaaactcagagggatttggacattgtttggtcatagagaataaaaatccttggctagggaaaaccaactttaaagaacagctggatttaatgtcaaaggcaaatgattttctttccccctttaccgattgacttgaatttacattgtgcagattgcgattattcccctactctatatttatagtttctcatttgcattttccagaataattaagaatttaacctagaatgggccatttttgaatagaggtgaatgctttctgatttttaaataaaccatctaaattagataccaaatatacgttgtattctccttgcctccggcttggagtccttctaagcttctggactcgttactggaacccaaagggagagattgctcaccccatccagaagtctgtttttgtctaggaggtgactcttgttcacagaggacaagccattttgcagatggggtcatctacgtatggctatgtggagcccacagacaagctcagcagcctctttaatgggtggacactgagggactccccagtgagttcccagcagacagcagaagaggagagcagctctgcattctttgcttaaattccactgaacatttccaatctattttgctttgctttccagtgcagactcttcctttgtgcttttaaaggatttacatctccaggaagaacataactctgacactccccgaggtcatgctgccctcaagattcagctgagaagggggagagctaatcctcaggagagtttgctcctccagccagagcatattcatcatcctattgctcccatttaacacaggaaggccaaagctccaaaggtcaaggaatatgtcccacatcacagagtggcaggaaaaactggcaactgggcccacatctatctgccttcaaagcctattcactcttcctatctactttactacgtcccaaatttataaatggaacctcatcattgtgagggctgcttggttctaatgcaacaaagccccctgtctactccctaagttcattctctgttagtgagtagggggctactaaggccacgtcaaccctgcagctgctggattctgcattgctacaacatggttccaagagaagggctgtgttctccctgggcagggggctctatgtccccaggcaggcatgaacagaactgcagaagtgattcattagagcttcctgagaagtctacagccccaggcagttgtttctttccttgggacagaaggggcaggggtaggggagaaccatgagactctggatgcatgtaggtgtgcaaacagccaaaagctctttcagagttcttggatggaggcagagcatgttgaggtgtgttgaggacagctgacctggttttactataggtttttgagttgtctgcaaagttctctgcatggttgggttccagagtttcaaatactccctctacccccaaataaaaattagtagtaatcccaacaataatgtctgtaagccctttgcaaaagagtcaaagaccctgccagtcagacagcataacttgtgaatttcctggtactcacctggaccaggtcattgatcaactagttagcaaagattggggcttaatggagtctgatgggtccattttgacatggaaatgcactggaaacatccctgggaagggtggaccttagtgaggttctacactggaggagcttagccaatgatatttgcacttatcaagcacttactatgtatctggtatagtaactaggactcttaaatgcattttctcacttcattatcactctataagaatgtaagtactattattatcagccatattacaaatgaagaagctgcggccgagagggttaaatagcttgcctggagttgcccagttagtaagtgttggcaccagaagtcccacccactcagtccaacagactctacagataggctgagcatcaggaaaaggaagtgtgtatatagggatgtgtgtgtgtgtaggggtgtgtaggtgtgtagggatgtgtgggtgtgtaggggggcactggctagacaaaaatgttgccaagcatcttgtctggcctgaaagcgagggcagaatggtgtctgagtaaagtacttgtagcttagttgcacttgttgtgacaaaaccaaacaaacaaaactaactttacctctgtgagaatgataggcagaggtttaaaaaaaatcctgtaatacttgctttgttttggcttcaaaagtgctgttgataacagctgttcccagtgtacagtgtgtttattgttgagtaattatgttttgctttcatattggcaaagctattatttgtacccttaggagcagtggacatcatgtatgcacaaatgaattaatgtgacaatggctttcgacgttggaagcagtgacctattaatcttcagtgttaaataaatactcagacctgttcatcatggtgcctatcactactgggtttcgctggctacaaatttcacaagatcatgcaacccaaaggactggaatatagacaaaaagagagaaatcatggacatctctcttgtgatgattttgaaacctattcaaaggccaaagagtgtttctgatttaaaacagccagagtggtcaaagccagacattggaaatttcccagaaagcatgtcaagggaaagattcctgcactgtatcctgtccctagaaggctaaatcaaagtgacattcctctttctccactctccacttacttttgcacacacgcacgcacgcacacatgcacacacacatgcacttgcatgcccagggatctttgatttctctcaaacttccttagtacctcatggaggtctcagtcaatggtattgcttgactgttttattattacttgccatttcctgtatacaagccaacatacagttagctaacttgcccacttagttgactaaacggaaaggcagacagaaaacctcagttaggtgaaagatgatgaatattctcaaggaataggaaagtacaataatgaagaaaaaggtcttgtgtgaccatcttgcagacttgcattccaactggttaacttcagacaagaggagagactgacaagcagggaggagacagcttacacacacagaaaagagatgggaaaaatggaagaactgcgtttaataaatattcttatattcttgtgtcttcattatgtccaaagtgaagtgtggattgtggattgcagaaaaaaaaagcaagatttagcctgtattcccagagaaggcaaattgttggacaggaaacaccgaccctataaagaggcagtgagaggtggctgtgtataaagggccccagtaagacatggtgagaatgaaaggagaacaggctttgtcttacacactcttcaaggcaaatctgaaatgtccagaaaacaggaatttgaaggcctgacagaggtaggaattcattttggctaaagcctttttaattgaagaagaagaatgagagaaaaaagcaggaagaggccagaaaggaggtcacccatggagacaaatgatgaataaggcctgagcagtgcctggggagggaggagggagccgaggagggagccaaggagagggccaggtgcctgtattcaatgcagaaagggatgagatccagaaagtaggccaagggaacttggtctacaaggtacaaatcctgttcatctctgatacatcccatgggcagtgaaaccctggagtcaaatcaccatcccagacacaagtaggccaagcctggcactgagaaaaggtttaaccagtggcttgtcaatgaggtgccatggttgaaccttaatgctaaagtgagtcctaacaccaaggccagcaggcagctgttcctctacctgatgggaaagtcacagccacccccagtgctccccaaataagagtacgtggggctgggcacaacaccttgagaggctgaggcaggcagatcacttgaggaggagtttgagaccagcctggccaacatagcaaaaccctgtctctactaaaaagacaaaaaattagccaggtatggtggcacatgcctgtggtcctagctactccagaggctgaggcaggagaatcacttgagcccaagaggcagaggttgcagtgagccaagatcaggccactacactccagccttgatgacagagtgagactctgtctcaaaaaaaaaaaaaaaaaaaaaaagaggatgcgggtaaggtgtgaatatcatctcttgggaatgggtgtgttttccctcatgaaaagaatgaaggcctgagtgagatcatgtctgtctgtctactactcaaaatcctttagatcaggggtcagaaactgcagctggtgtgatgtgtggctaagaatgattcttacattttcaaaaggctggtataaacaaacaacagcaaccaaaaccaaaccagaatatgccacagaggctgcatgtgccatattcttatatggcacaaaatatttactgtcttgccctttacagaaaaatgtttgctgacctctgctctagtggattcccaccacatttagacaaaatccaaagtttattatggcttactagtggcattggcagattacacacacacacacacacacacacacaaacaaacaaaaacaagatgcttgcacaatatttaggatatacttatatgaaaaaatgacttgctttttatctgaaattcaaataaaactagacattttgtattttacttggtaaccttccttacaggacatgaaagggtggtatagcaggagtatgagctctggatcacactgcctgggttcgtatctcagctccgccactcatataactgggtgagtggttaacctttccatgcctcggctttgtcaactgcaaaatgggggtgatggtgtcctctagggcacctggaacagtatgtggcatgtagtaagagatcaggagtaccagctgttactatatcacctgctccaagatgcccgtctggcttttcctcctgctgctccccagtttccacatttcactatagctattgtggtcttctggccattcctggacactgccttaaaggctttgcacccatggcaccctatgcctagaacacttttctttctactagcctacagagctcactgcctcaatgcacaaaggatcctgctcaactgtaactcctggaaaggcctttcctgctctctctctagccccctttctgctttcctctgtcatcacagcatttacctctccctgatactgtttatctgtgttatttgctcatggtctgctctcccacggcaatgccagcttcctggagtgagagtcttagtgatcttgttctctgtaatgttcctaatccctagcacagtgactggcacatatttgaagaataaatgggccaggtgcggtggctcatgcctgtaatcccagcactttgaaaggctgaggcgggtggatcacttgaggccaggatttcaagacaagcctggctaacatggtgaaaccctgtctctactaaaaatacaataattagccagtcgtggtggtgcgtgcctgtaatcccaactactcaggaggctgaggcaggagaatctgccgggaggcagagattgcagtgagccgagatcgtgccactgcatgccagcctgggcaacagagtgagtgagactctgtctcaaaaaaaaaaaaaaaaatcaatgagtaaatgatctactgtactttgctaaggggcttgcttcagagtcatggaaatagttataaagacatcaacacagtatatagaggattgactacatgctgagacagggtagtgaataaacagacagggtccttgtccccttctgagtttacaacctagctgggaaggcagatatgacacagatacttaggactgacaaagtataaaatctgaaaagagttgttaacaaaagtcctgggagtcttgagagcatttaaaaggtccggaaggtcctcccgggaaatggacttttgagctgagccatgaagcaagaccaatttagccaagtgaaaagggggaagaagagaattgtagtccaagggaactgcatgtgcaaaggcctggaggcggggtaggcccagaatgttcaaggagcataaaggagtgcagggagcccaaggatgtgggctccttgccactgtgtgtagaaacctattagtcccgctcagtgctcgggctttttgtgttctggcttgatgcttacatcagcacaactgaggtgcatctgggccaacggcagcctccttgcatgtacttattaaaacttgggtttgttattcttttcagttcatttaagcactggcagaaagggctgagctgacaggtctgaagactgatggatggatgggtgatgcggcacaggtgcttgaggtgctgcgactcttttttgccactccctgtttggcagtgacagccccgcaggaacagcacagccttgagtcagccctgggtgtcctctcattggcaagctctatgagcctcaatctccccactaacaaaatggggaggtgggtactaatatgtgcctcgtaaaaaacaagataattagaagggatataatgtgctcagtttgttgcctggcacatgcaggggaccccggaatggtgagcctgtctctcattcctccctcttcaaacccagccttcttctactcagcggaatccattccagagaaggaagacttgaagctaacgttttccatcctgggccctttgaaattccggttacctgagatagtctgcagaaataggtgctgtggtaaaataggtccgtggagaattcttcccctaaaaccgcaaggttccttcttaaagcaccaaccaggggattttcctcagcccagagccaaggatgtgtggatgtttgacactctagagcttcctggcaaagtcattttgtgatgcagcacaggccctcacacagggccattcaccggcagggactccaagtccatgagtccctttgagtgcagggttgaggtgtttctgactaaagagggctggtcccctggctgcagtgctggtcgccagcttctgcgtgaaatcgccttattgtaggaaacccagagggttcctcactgaccccctactgtcacttcagcctcccactcccagagttggtacccttagagaagctgctgttggaaaaactttataagcattccttcacaggcaaccaagctcagaatcacggtgcttcctgccggctctggggtgggggtcttccagaagaggcttcccatctgcacatccatgctggcgtccggcatctcctgagaccaagagacatttttgtcctgaacacttctatactactatttgtcaaatggatgtagaagctgttgtaggtagaaaaatagaaactcatttagaacttttttctgagaaataatattagtggccactaaggtataaataccaacatgtatggattggcaaatattgttagcctaaaaaccgtccttattcccagacaagtttagagctctactttattattattattattattattttgagacagggtcttgctctgtcacccaggctggagtgtggtggtgtgatcatggctcactgcagctgcaagctcccaaactcaagcgatcctcccacttcagcctcctatgtagctgggaccacaggcatgcaccaccacatctgattaattttttaatttcttgtagagatggagtccccctatgttggaacactgctgtagaatatttggtattcctcatcacagatgaagagactgagtcagggagtgactggtatcatgcttaaactcagtgagggcaagcaggggctatggtatgctagttcgtgaagtgtatgatggggtcacacttcaaactgccctgtcctccttcaaagctccttttgtggggagatgcaggcagggagaaaggctgctatattctgcatcctgctgaacttgctgtggccacccttggatagcctggatttgaggacgtggctttcttatctgatgagcccaatcactcctgcgtttgggctggcagcatcctgcaaaggtgcatggtctagagcagaacagaatgagcactgccttaggagttagaaaacctggattctaacctagtttaaccatctattatccttgtggcttggggccagccaattcctctctttttgttgtttggattttttttttccaacatccacatctgtatagtgcgcggtcggtgggagagggagcaaatctgctttacttttcttacaaagatgctgtgaaataacaagatgtaaaacattttaaaaacattcaaaatgattcagccagactcgggctgctgactgtattttggtgctaatgccaaagcaaacatttccatttcttttggcatgtctagcatcagattcatggcctggaattgtcaaaaactgaccagaaaaagtttcttggagtctgtcaagggcattcagttatggttcagccgagtttaaactttgggaaattgcaggatgaaattggaaattgccctgggtaatggagagccaaattggaccttagagcaggtagcagggtgacttattttttaatgtttccaacatgaaagaacacaattgattttttccctccttaatccctccaactccctagcttttattgtttctaaaataagataaaccaagcaggtgttatttcagctctgtaaacaatctttatttttctggccgataggaatggaaattgagacggagaccaggcttaagagagggggaagccaggcaatcaaggaaatcattgatcttaacttagccagttcctactacttctgcaaaagctcacagtggtcgtgctcccccccgtaacttacccttgggtctttgtcgatacctcatgaaagtgcggagcctccggcagagaaatcttcaagcactctggttccttgcacagatcaaatcgcacttgttattttttaagattagtggcagctcctaaaatgactttactttctcgatccaggcaaataattgtccaaagattttattttaatgcttcagtgctgggaacattggaggagtttctatcttatggcacattctgaagttccccacctattttcttctccttctgtgtgtttctgccacgggcagaactgtgtgacattcaaaggccttttctgagtttgtagacagttagcagggtggagacaaggaagacatgagcctgaatggtcctagtgaaggagataaacctgtgaccctgggctgggtctgagtctgaagattggggtacttgctgctgctagagtgtaggcatcaatccaggaaagccccttcccttgtaccagtccaaaatcttgtgtgtctcagtcttgggtgagtcctttcgctccttgaaaagcagttttggcagagctggctcagatgacaagactgttgctccttcttccaggaaggagaaccttcagggctattctgcagtgtcagtacaggatgtgagagcagaaacaacagggtatagaagctcctcgagctagcatgaggttacatcctgatgaacccatcgtaagttgaaaatagcagaagtcggccgggcgcggtggctcacgcctgtaatcccagcactttgggaggccgagacgggcggatcacgaggtcaggagatcgagaccatcctggctaacacggtgaaaccccgtctctactaaaaatacaaaaattagccgggcatggtggcgcgtgcctgtagtcccagctacacaggaggctgaggcaggagaatggcgtgaacccgggaggcggagcttgcagtgagtcgagatcgcgccactgcactccagcctgggcgacagagcgaaactccgtctcaaaaaaaaaaaaaaaaaaagaaaagaaaatagcagaagtcacaaatgcattgaatacacgtaagctaccaaacatcatagcctagcctagcctaccttaaacgtgctcggaacacttacacaagtttatagttgggcaaactcatctaacacaatgcctattttataataataaaaataaacaaaaaaaggcaaaatttaaaatatggtttctactgaatgcacatagcttttgcaccatcataaagtcagaagatcattaagttatgccatcataagttcagaacgtctttgtagagtacaggtaaggtctttgatgacagacagactcaggttagatgatgttagctttgtgctattatcttagcttcctgagcctctatttccttacctctaaaatggggataatacctctaccactccggtctcaaaaatgttagctacaattatcatcattgttgttttatagtcatccttaaccagtatctctagggtttatgtatattttcatcaccactaattagtacttattggttgaacaagaggacagaatacttgagctgggaactgtccctaaaaatctagaacatgaagacgtggtggacacttgctttgcttctactgtgcctggcaacatgtcacctcatgaaaggtggtcactgcctcagaattgtccctaagtttcggtaaaatggtgcttcatacaagcaggaacctgagaattgggatcctaggctgcctcagaaactagttacctggtgttattcattaactcagagtagcagaaggcaagaggaacagaaagtgcagttattacttgggattacaagaagctgagatgctcacactccataaacacacaactcaacgcctttcccatccccgagaccatggggcaggcagaacccaaatcaaactagtcacgggccacataacaacatttcaggcaatgaaggactgcacatacatcagcggtctcataagctttataaggaagctgaaaaattcctatcgcgtgctgaagtcatagccatcgtaatgtcctagcacaattaatttttttaaaataaatttagtgtagcttaagtgtacagtgtttctaaaatgtacaggagtgtacagtaatgtcctaggccaccctcactcaccactccttactgactcacccaaagcaactttcagtccaggcaagcttcattcgtggtaaatgccctatacaggtgtaccatttattatctttaatgtttactgtaacctttctttcttctcttttccctcccctctcctccccttccttttgagatggagtcttgctctgttgcccaggctggggtgcagtggctcagtgtcggcttactgcaacctctgcctcctggcttcaagcgattctcctgcctcagccgctggagtagctgggactactggcgcaggccaccatgccctgctaatttttgtatttttagtagagatggggtttcaccatgctggccaggctggtctcgaactcctgacctcatgatccacccaccttggcctcccaaaatgctgggattacaggcatgagccacaagccaccacgcccggcctctgtcattctctttctttctctttctctctttccctccctccctccctttcttccttccttccttccttcctgcctgcctgccttccttccttccttccttccttccttccttccttccttccttccttccttccttccttccttccttcccattctgttccgttacactccactccactcaagcaatcaacctgacctcaagcaatcttcccacttcagcctcccaagtagctgggactacaggcatatgccaccatgcccagctaattttttaatttattgtagagatggggtctcactatgttgcccaggctgttctcaaactcctgggctcaaggagtcctcccaccttggcctccaaaggttcttgaattataagcatgagccactctgcccagcttagtaccttttctatattttaatatgtttaggtcacaaataccattgttatacagttgtctacagtattcagtacagtaacatgctgtactgtggcctggtttgtggcctgggatcgataggctataccatatagcctaggcatatagtaggctaccatctaggtttgtgtaaatgcactctgtgatgttcacactgtgatgaaatcatctaatgatgcatttcttagaacaaatccccatcgttaagcaatgcattactatacttctcgagtcccatgcaatcatgccctcggcggatgtgctgtctgtctggggcagctgttctctgcctgctgcctctttcctgaaatgcatctctaggctgttccttcctggcagggagccctcattagccttcctggctaatgctgctcttgagataatgacatgaacctgctttcaagggtctggagtgttttaggggaggagcactgcacttctgattaccataggtccaggtagaatgtgttcctattccgtggaacaggaagactcaactcatttcttctctccctgtcttgataaatttggggaagatctcaatgaacaagtgtctctctagtttccatatattatagataagctgttcggctaaactgaagttgccttatgtgggctaataaatggctgggctcagggggttggagatgctgtgggctgtgggggagccatgacctcctttgctttggggactgagaacgatgggcccaccgccctatggagcagcttccctcctgctcagcaactgttaggcctttccttgggtttgggcctgaggtcttccctgtctgagacccctgggtctagttggtcagcagtcccacatgtctctctggggtcctaagaatatttatttaaaactattatctattcaggattaaggggcctttcctttggagtatttgttctctgagtgggtgcttagcaactgaagtgctgtttgtaaaagacataggttggtgtccccaagcatttcataatgagtgtgggttgaaaagctcctctggtgatttttaaaaggttacctttcatctatatcacaggttctcagagcatgacctccaaaccaccaatgttagcatttcctggaaaactggttagcaatgtgaattcttgggctccaccccagacctactgaatcagaaaccctggggactgagggcagctctttgagctttaataagccctccaggtgactttgatgtgccttggagtttgacagtcactgtcctaagtggtcaggaggcgtggatgtcaggtatttctcttctgtaacaggccagaggacacaccttcagtatgatcattcaagagatatgttagtatctcttactttgggaggccaaggcaggtggatcacttgaggtcaggggttcaagaccagctggccaacatggcaaaaccccatctctactaaaaatacaaaaattagccaggagtaatggctcgcgactgtaatcccaactacttgggaggctgaggcacgagaatcgcttgaacccaggaggcagaggttgcagtgagccttgatcgtgccactgcattccagcctgggtgacagagtgagactgtgattcaaaaaaaaaaagtgatatgttagtatctcttaaagtaccatcgactaagcgccttcttctgaatcactgagggatacctattaaatatgtatacactatggtcccatttcagtttttctgaatcaaaacctttgaggttggtgacctgggattgtgtctgttcaacatgcttcccacgggcttctttcacccagtgaattttagaaataaccttcctattcaatgtatagtgtttgaccagcggcatgttcatcacctgggagcttgttagagatgcagaattttaggctccaccccagacacttaatcagaacctgcatttccaatatgatcaccaggtgattcatacacacattaacatttgagaagcattgccaagggccatatgcttagagcacttgctatgtgtgggctgctgattcatagtttagtcaacacacccttgagtagaaagtgtcattctagggtagaccaagggctcttaaaaaagtactagtgtcccatgggtcctgactcagacatcctggagcttgtccaggatgtgattaacagggtaacagatgtctttgcaaagcactggagagctgatccacacctaacgagtgtcacatcaaaggcaccatgtggatctcttgttgtgggtcttgcaacccctttaagaagggaagtccacttgaccgcccttccaaactgcttttttgttttcccagaggagacaggtaggcaatctcatcagcttagatgatacctagctcagagaagcagagatttaggattcacatgactcattctttcgttgctagttagttttatgtagctttccagaaaggtctgcccactgtcctttataccttagtgtgagttgaggttaatttatctttcctttggaccttgccactttagaagggaaagcttgacaatgtgtgccatgacaggctctagacttccatcaaaggaactttaggcatcaaaagcagatgaaaaggtattggatttggtggtgggggaggggctttctaggaacccacaagaaattactgacttgtttctcttttatatttctgggaggaaaatgattgggccaaatggtctctggggctctttccattactggaaattctttggagtatttattgagcattcactctgtgctaggtcctgtgctggacattgaggggataaaaatgtaaactgatgcttctacctgtctcccaggatggggtgggaagggagacagagacatcagcccctctctgaggtccaagagatgctctcctcctgtcactccaaaaccgatgtatcctgatggtaactcaatagtaaaggaaacttccatttttattggtgtgagtaaactcattcattcattcattaaacaattattttttaatgtctcctacctgtagacaattgtttctgaaatttgtttttagatttgaatatgaaaatgatctttcttaagagcacctgtttcaaagataagtttgtaaactttcagactagttggaacatattgttgtgaataaagccctgattagaggagaagaaatgggctgttttccctctagttttccataggacagtttgagagaggtcaagctggagttttaattgaggagggcttttccatcagtcagcactggccactcatgaaatagagtgacctcccccactcaacaaacacacacacttggaactagtgaaggaaaggtcagatgtcattgccaagggctttgagaagggacctggacttggtggcttcctacagtactttccaaccttgagattctgtgaggaatagagggctgtgtgagattcatctcagggactgtggtttcttttagcataacatcctcatggcttatttcgtcatgtttctgcacaaacattatgagtagaatggcttgcatttgcctttctaattttctctcccaggtgaaaagacactaggcatatggttcaaacacaatggactgatagaaaacatgaaagttagaatgtaacagatatctcaaaggtagcacctaagaaaaattacaggcactttcctccccaaactggactaaggacctagagtttcagtgaatcccagaaaatgtcaggtttctcattaacctttctctaagttacctaaaccatatcacaacccacaactaagggaaatgctggaggtggcatgagagccacgtgctacattaaaccctatgcctgggtagaaaactgagaacttagaataatttagatcaagtcaccctcttatttaaagagttcaagcaaagccaaactttgttgcaccattccctatttgtattctgaagattcaagaggctcacaaatgctgatcctataatttgggtacctgtcaccagcatgcatggacctagtccaaacagtcctttgtgttagtaatgtgttgtcagagagtcaagtaagcaattgtcattttccataaaaattaattgtttaaaactgatctctagctacattttaattttttttaatcaaaactttaaagaaacccatagttggcagtattgcctaatagccgatagagcaggctgtggagtcaaacagatctcagtaagaacctttagttttgcttctttctagtggtgttagcttagggcaagttacgtatcttctctgaacctcagtttcctcatctgtaaagtgggaataattgtaatacctatgtcacagggttgttgtaaggaacagtgagataataatcataaggggatggaaaagtacctgatttatacttaagtgcctcattaagattgctattattatacctgatttttccatagtggggcttgagagtgtggacctgtggtcctagcattctgaggtaaaaagtagaagctctacagatctcagggtttttacagtctaggatcattccctcattcagtcatttgtccatccaacaaatatttatttagcacctactctctgccaggcactatggtagcagtcagacaataagcaagtgactaagcccgtgtgtaattattggttgggatacatgccaggaaggaggcaaaccatgggcagtgatgggacatgctgctaagcggggacctactttgataggataatctgagaaggactttttgagcaggtgacatttaagctgggtccaaaggatgaaaaagattgtgtcaggcaaagaaccactgatcctttcattagtgcataaggtagacacgatttcaccaggagtactccaaacaaattgagagccccagctttcttctcatctgtacaagaagtagaccttgccagcaactgggagggaaggttttgctcattttattatatatggtggagggttcatttatatcaaacttctctagagcccagcattttcaggggtgttgtaccagcagggatacagtttcccacctcagtggaagctggcaggaagttgcaggaagttatgaaaagagagtgagccttcagtccagatctgggataaaatctacctcaaccacttcctaattcagtgagtttaggcaaattagatgatctctgagtctcagtttcttcttcggtaaaatgtgagtgtgactgctgttgtcaggattgaaactgaaatgaaatagccatacaaaccattcagtctagtgcctagtatatggtaggcacagagtaaagcacactttcctgtggggctgtgtatttaaaacagtgaaaatcgattcctcactttctaacccatgtggtagaaaaagacatctttggcatacgtggtggctttaaaacaggtccacaaattctttgacaccccttccattcaaaaatagagtcgaattcccttctccttgaaaatggacttgcctgggtcactcatgcctgatgagtagaatgcagtggaagtgacactggatgagttctgaggttgcgttggaaaagctaatacagcttccatctgctctctctctcggtaccccccatcttgaaaccgtgttgtaaaaaagccaagtggccacatggaaaggcctcttacagatgatgttccggctaaagccccaggtgagatcccagccaagagtcagcatcagctcagaaggtcgaggctgccatgagctgtgattgaaacactgcactctggcctgggtgacagagagagactctgtctcaatcaatcaatcaataaaataatttcccagaaaagtcagttaattaaaaaaaagtcagaatcacccaccagatatgtgagtgaatgagccttcagatgattccagcccccagcctttgaatgacccaagcgagctagagttgaccagagacaagctgccccaaccaagccttgcccaagctgaagatttgtgagcaaaataaatgctgtcattgttttaagccctaagtattggggttgtttgctacacagcaacagataactagaatagcacacttctttgtctttctccaacccaccccctgccatagtgtctctcccaccactgtagacccagagtagcagagatattaggaaggacactgtaccatagtgggatcttatttcttccactaacatcctgcaaagtcttaggcaagtagctcctcctgtggggcctcagtttcctcctgtgtgtggtgagtttggattaaatactccctaaggcatctgctagtcccaaggtcatgtaggaaactaatatgaaaataggaaaagttgcaagatttaggtattttgcattgtaggcctaagttttgcatgcagtggcatggaaacccaatgttctctgagagccttctttgcaacttttcaattaaagaaaaaaaaaacatggtctaagcatttttttttttatttcagagggagattttatgtatctcgagacctccatgtgaaccataaaatgggcttggttggagccttgcaggcctgtcctgatccaattgtctagcaattctcatagaatcctcattagaacctgtgccctaaagaagcctgcaaacctggggcccatttaacacctgcagttctcttaaagtttaaacaaagactggcaggcctcaggctaacagagttttaagcccccatctgttgggtggtttctggcagatggtctttaaaagatgctgtgtgttttatcatttcagtttcttctgaagagggatttaaaatcaatttaagggtcatgttcagggactttgtcaaaagtacaggctccacgtcaaacaggaatccgtcctcaggggctcactaatgacaaaaggaaagtgatccgggctgttccatggattcttgttctcatctccttcctttgtggaggggatagcttttcttttgaagtctgttgcttccttcatttagtctttaattttataccaccaaggtgagtactactctgtcttatgtacataactgactgtggtatgggagacttccctgatgagcaaaggccagtctgaaaagggctggcttccaggtttccaagtcgaacatcatactctaaatgaaacagaggaaattctcattaagggaaacttctgggtaagctttggcgggaagaagaaatgaaaaattgtagaagctttagaaatctcagctagcttatgcattatcaatatggaaaaatggattgttgctttttccatccccgctcctacccatggataggggaatcatgaaactcaacatcagaaaaagtaaataccaagagcccagaaagagcacaacttgtttttcttggtctgtttaaggctgctgagattgaattgtatccctaggatattggagtttttcttgtctattgcctagagcctggccattattgtgatatttggctgagacgttgccaaagtacaagaagtgtttgttattatgagtccttcactgaaaggtggctggcacatgaagggccctattcattgctggccgttgcagctgttattttggtaggggctgcagctgtgtgtagggaaggctcttgctctgggctgctctaggtgtcttagagcaaacaaaaaggagggaataagctcttcaggttgtagttccactttggattgcaacctaaggcatgcttgctcacctggctagaatgggagaataagtgaggtttggcatgccagagtctcctgccaggggttccctggccctgagctatggttgctggtttctgttggatagatcactggactaatgtgtcagtgcctagtgttggatccctggctaggtggagaatctaacatacagatataaagcctgtaggggaaatcagagccaggaaggaccttggcaatcaattggcctagcccctttctattatgaatgcagaaactaggcccacagccatggaattctttccccacagcctgtaacagaggcaaggccgcccatctcttctctcaactccagctcaggtctcagtccaggtcaagcagcctgtgaactcaggcccttggtcacaagggtgttcagaagagggcttagcaccattcgcccatacctactgtgggaaaagcaatgtagagtgcttgccctgctgatgtttatcagcaagcctgccttaggattaagatggcatctcacctaatggacctgtccctgcattttccctccagaaagagggccttggacaagatgaacctccctgccctgttcactcgcagtcacacaggccctgcctgaggtgaggctgaatagaagcgaaggctgtcatgagttggaaatggcccccattcccagggaagccctgtgagcagtaaagttgttagtgtgatgaaggccaagatgctcactgatgtgggaggcagagttcaggtttcattattgaaatgtccagattttttcatgggtgattgaaaccttcttagtcccagcactttgggtgagtaattctctctccccagctcctcttcttgaccccatttggaccccagtcacgtaactgccagcctttacccactagggtccctctgaagctgcagcttggatcccatgtcagagtctatctatgtggcaccttcaacttgccccagagacttttgtaaggggatagaggccaaagaggcttttgtcttggaagaaccatcacaaatgattctctacttctaagaaaggggttgagcttggttgctgtcagcttctcattgactaggtgatgtcaccaggggagacatgggctggttcacttcaataaccaagcagctcaacttaaaagctttgaatggatctgacctcttattccagattgtttttgtgaagattgattagcttcagtatgcagattatataaatttattttattttaacacacgttatgttttagagcagttttaggttcgcagcaaaattaagtggaaggtaccaacatttctcatatattccctgctcccacaatgcatagctcccccactgtcaacattcacaccggtttggtataatttgtaacaattgacagacctatgctgacacagcattatcacccaaagtctatagtttacattagggttcacttttgatgttgggcactcaccgttatagtatcatagagagtagtttcattgccccccaaatcctctgtggtccacctatttatcttccccacccctactcctaacccctagcaaacactaatctttttcctccatagttttccatttctagaaggtcatacagttggaattatacagtctatagtcctttcagattggcatctttcatttggtaatattcatttaagtatcttccatgtctttcatggcttgatacatttctcttttttattttactttatttttttctgaggcagagacttgttctgtcacccgggctggcatgcagtggcacgatcactgctcactgcaacctctgcctcctgggttcaggcgattctcctgccttagcctcctgagtagctgagattacaggcatccaccaccacgcctggctaatttttgtgtttttagtagagacagggtttcactatgttggccaggctggtctcgaactcctggccttgagtgatccgcccaccttggcctcccaaagtgctgggattacaggtgtgagccaccacgcctagcctaatagcacatttcttttgagcgctgaatgatatctcattatcgggatgtaccacaattaaataaatttttaaatatcaaatactctatgttagtgtgatttgtctgttttacttgccacctaatattggcactattcataaccattcagaatctaatgcttctctcatttttaatatgttcctttcaatagtcctttgaagcaggtaggaattgtcatggtccaaagataagagaacaaaaggacaaataaccatgtttttctgtctgtctgtccctttgtctaactgtccctctgactgtcctcatgtctgtctttctaaccaccctctgtttgtctcagtgtctgactgtccatctctctctccctctttgtctgtcttcccttctttcatccgttccttttttcttcctttttttcattgaataaatatccgctctcctactatatggaaagcgttacttttgttaattcgtgaagctgatagagctctgttttacctttgtggagcataatagtcaagtaaactggccctgcatagttagggactgaaaacttctcaatgtcagaagtagagacttgaaacaacagcctctgacctcacatcagaatgcagtagctctctgaggttctactaaactagggaatgagtatgtatggtgtaggcattcaatcaatgtttgttgaattgaatgcaatacaaatgataaaagtaacattacaagtgaattcttgaagtcttcattacatgtattggaaggtgtttttggcattttatccacatttctagttgcatccttagtgcctggcacacatgatagagtttcttgtactgctgtggtatgtatcactggctatagagtcaaaacccatgcttgcctctaattatttgattctaatgggggtttggggagtgaactcacattgaaacagtcattgatatgtgcttggtattcacaatacacatctcataaaatcttttaacaataatacaaggcagaattttcatcttcattaaattttgtaacagatgagaaaaaggaggctcgaatatattaacctgcctcaatcacatgccttgtaagtggtagaatggaaatgcagatccaagtttatcaaatttcacaaaccatgtaactatgttctttttttttttttttttgagacagattcacgcactgtcgcccaggctggagtgcagtggcgcaatctcggctcactgcaatctctgcctcccgggctcaagcaattctcctgcctcagcctcctgagtagctgagactacaggcacataccaccacgctcagctaatttttgtatttttagtagagacggtgtttcacaaagttggccaggatggtctcaatttcttggccttgtgatctacccgccttgggctcccagcgtgctgggattacaggtgtgagccactggcacctggcctatgttctttttttttttttttttttttttttttttaagagagactgtcttgccctgttgcctaggctgtagtacagtgacatgatcttatctcactgcagcctcaaactcctcggctccagtgatctccctgcttcaggctcctgagaagctagaactacagatgggtgccactatgcctggctattttaaaaaatttttttgaagagacagggtctcactatgttgcccagactggtcttgaactcctggtctcaagtgatcctcctaccttggcttcccaaagcactgggattacaggcatgagccactgtgcctagccaatataataatgttcttttctcccttttctgcacatctttgaaatcagatatcctagaaattattgttttgctatttttggaactggattgtcaatagcaaatatccttgtgtgttctgactatggtttcattctgagtttcatgaagctctaagcataaaacttcaaatcaccaagtagagcaaatggctcatggcatggtgttcctatcatgcttcagctttaagttgaggccactctttaattgattcagtctctatagagggtaaacaagtctcctttcaatagtccttgtttgaaatttcagttcttcatttgattctcttttcccacattgaaaaaccctaaggtccacatattcaaaacacgtctcatatttctcctcgtcctaaaaacctgggcaaccttctctaaatatgaccagagatggattcatgggctgtgttatcaccactcagtagttctggagtgacaacaaagtagtagatggccacataagttacagaattttcccagcgggctcataagctaaattatgccatcaagacataaatgtggaaggctattttatgataaaaagtaatgatacatacaacatgagcatgattcttctgcaaaaagggcatgcaaatttataatatatcgtttacttttcaagcatccatttggtccttctctttccattgatatggactccaaggtccatgggggctgggactttttggcgtgatgctcggttttgtgtaactaggtgcagcacctagttacagttcaagaacagaacaagggctcaggtagtatttgatgaataattgaatgagtataatataacatgatcttcctgacctgaggcacatgaaaagctactgccaaagccatctttctagcttgctgttgctgatgatctctaccctttttcactgctcttataccaagatctgggtttcagggctcaaattaggcccaccaggcttgcatttttgctcttgctctctcttgtgcctgttgttctcccgctcaccttggctcagctatcctcatgatggcctgactattcttccaaggtctaacttcaactacaactcaaaccattttccaccctccatgcaggcacatgtgttattctgaggaaccatcccaaaatgtttcctagtggtggagactcagggaggattatgtaaaagaaaacagacaccagattgggaaggatggtggaggtaacgcttcccaatagactctttttctgggcaagccatgttcatggcagatgcctaccacctgcttgttgtattctggattccctagtttgccagttcttttctaaaacaatgcaagaaatgaatgcaaaattatcactgtgctttgcccactgtggagcccagagcagtcactgctgcccatagccaagagattttgcttctcgtgatgtcacttaagattggaattaacgtcttcttagctgccatgctgcactgctagctatccagagcttggggcaatcatacatccagacccattttttaaactatatatgaaatgtaaaatcagcaccaactgcagttttccagaacacattctatacttgtatagagaatagttttacatttgtttttcaaaagtaattcacattcatcaaaacataatgaaaaaatacaaatataacaaagctacctataattaaatcatgcaaagatatctacccctaacattttcatgtatagcctcccaatctgtttcatgcatttatctctagctagcacctatatattttcacaacattagatcacattgtttatattgttttatgacctgccttttaaaattaacatatttgtaaaaaatacttctacatcaacacataaatttctacaaaacgcttttactggataagattttattttaaggatgcccaaagtatatgcaacctatcacataccgttaaacatctaattctttctaatctttaggttctaccaagtactggaacaaggaacatcactgggtctaagtatttgtgcccattctctgttacttccctgggatagtcaacattagcaattcaattaataaaaaatattttaagacttctgatccataaattttgacaagtattaaatttcatcctgtatacggcttaattacaaatgttaactctattttctgtgatatcagttatcgctacaaattcaataagcatttttttctatgtcttgtcattgatttttaaaagtgttcagcaagataaaatcactcattctataaatatttgccaaaagtcgacactacataaggcactctgctagatactggggtaaggggagtagaaattcaagagtgtataagccttaatcttggtcctcttttatttacttagtacaggaaacattgcttcattaataaataattctaagcattatttttattaaacttgttcccttgtttccattttttaatgtactaaaatataagttactttgtcaaattttaaaatacactgtcaaaatgaaaataagggtaatttggcatgaacatggcttactttatttccaccctggatttaaaaaaaaaatgacacatggttattttagtccattagaaaaattcagaaaagtataaagaagaaaataaatgactcataaccagaccattgaaaggcaattactgttaattggtgcatttccttccaggcattttctttgtatatttttcacacagctagatcatacaatatatgtaattttccaagcatataatgtaaatatttccctatgttatcaaaaaccctttgaaaacattatctctaatggctctataatattccatcatggaaatgaactacatatatagagtttgatcattaatagtaaaagctctggagtaagacttcctgggctgtcattctgatgctgtcatgggctggcttggggtcttgagcaagttacttttcgatggctcagttttcttatacgcaaaataggggtaattataatctctaacttacaaggtttttgtaagtgtattagtcccttctcacactgctgtaaagaactgccccagactgggtaattcataaaggaaagagttttaattgactcacagttctgcatggctgaggagggctcgggaaatttacaattgtggcagaaattgaagcaaatatgtccttattcacatggcagctggagaaagaaatgccgagcaaagggggaaaagctccttataaaaccatcagatctcacaagaattcactcgctatcatgagaacagcagcatgggggtaactgccgtatgattctattacctcccactgggcccctcccatgacgtgtggagattatgggaactacaattcaagatgagatttgggtggggacacggtcaaaccatgtcaataaagaataggtgagataattcaagtaaagcttaaactagcacctggtacataatgagtatgcaataacaattattattactactactcttactactactattactattattttctaaatcatttaacctattgctagatatttaagttgtttccaactaagatagcatttattattataaaatcactgaaggctgtgattgttcacaaacacttttataactttcaaatattttcttaggagagaatcagtcaaaagtatcaacactcttaaatactgcctaaattagttatctgtccttatgtacagtataatgcattgttgttattctaaacaggggaatggtatatccaaatcagaaccccctgtagggctttctcttgcctcatcctctccttacccatttccattctccctgcaacccctagatgacaagtgagaatcagaatctctggggcatttgaaactgacccttttaatttcttcatatgcaaaacgagaataccaatacctgtttcatggggtttttgtaataaaaaaataaaatgatccatgtgcatagcaatttacacatactcattgttagtcaattattacattattattaaaaaaattaaatttacaattcatacttctaccaggaatgtataagattatctatctcattgccctcagcagtgctgagcataattattttaaaatatattttaaattgtatttaaattaccaaaatatctattaaatttatttaaattatttaagtgattttaaatattttctaattcaataagtgaaaagtagtagtccagtattttaattttcttttatttgattactgttggaattgagatttttttcaaatatttattagccattgatatttggatatttgtgtgtgtgtgtgtgtttcagaaagagagagggagaaagagagatcaggatctatatttatttttacaggtgtctttgttttgtaattatttttctttttgagcatgggggaagaggttgctcattttgatagtaaagatactatccctagactgaccatgtcttattcctactgaactagttttgtctccctctggtcgatgtatatttctaaaggcttccgtgccatctgattaatgatctattttagagttttctccaagagcactgttaaacttataggcctgtggtccccgagctttatctttttttcatgttaaaaaaatctgaaaacgttagacagtctcttctctttagggcaacatgaaatctccataattactcagagcagatggggatggagatggtctgcagcaccttttcttggaacttgaacatggttgagggataatgaatataaacagcacagattgcacaattgccaagtcaatgaatcttggacacatggctagaaggaggctgagtcctgggcccagtgttggatctctgccctttcccgctgcttgttctccaagtcctctcattgggccgctaacttgtttttccatgcctcagttctcaccttgggaaactgatgtatgctttgctggctcgcagactgacagcttttgtaagcattacaagcaactccaagttcaggccatctactgttggcccctctgatgttgatcagtggtggtctgccaggatctacaggccacaggctcagcaggtccaatgtcccatggccacttttttccaagacagctcctccaacccctcctgtcgctgcctgcacagccctgaaaacctgccggatccccgtgggtgtgtctggattgcagatcttcccctcctgtctacaaagtgtatgtttccctcatagggatcacatgactcttccctgaagttttaaaactcagaactctcaatggctgggcccatattttgcccagcattttattttctataataataatataaatcacattgactgaacacttactctagctaggcattgtgctaagtgcttcataagcactctcttatggcatcttcaaggcaagcatgtaagattgcttctattattcccatgtcacagaacaggaaagtgaagtgtgaagaagttaaatagtttgcctgaggtcacgtaggtgctagtaagtgttggaactgtgagttgagttcaggccagcctgacatctaaacccatgatctcaactccaagacagcatggtaccatctgggattccccatctggcctccttttcccttaatctagtttgcagccccttttataaattccatatctcttgccacagatctctattaaacaaggacatttcaaagctataagaagacctggctgccatttcattcttctgggtgataccagcagatcctgatcctgctttacttcatgtatgacttccagggagaatggctaggttactcttgttcctagtgccccgctttcagggagagtgccccactagccaattgtgtatcttcctcttgggtgtcatgttttctatttgctcagagtggatttccttctacttatttcctagcctccttccaaccccctggaaggctgcttcatgttctagtgcttctctctgttggtcttatattcactccacttatatcaattcatgaaggtcagaaactcaaaagtctttatctttggggtctcccttagtctattcaggctgcttaaaaaaaaaaaaaacctatagactaggtagcttaaaaacaacagaagtttattgttcacagtcctagagattgggaagtgcaagatcaaggtgccagcagattgagtgtctggtgagggcctgtttcctgattcacgagcagtgccttcttgctgtgtcctcacatggtggaaggggtgagggttctcttttgggcctcttttctgtgggcactaatcccatttatgagagctctgccaaaagccctacctctcaaaggcctcacctcctaataccatcacactggggagtgggtttcgacatgtgaattttgggggaaccataaacatttagtccacagttctccctaacagtcaacaacccataaacacatcttcctcaagtctttttcaccccaagggtgagttaaacctagtatagatataattgctatttacctcaggcaggaaaacctcacagttctacaagtgtgggcagtgaggaagccatggctggaacttctggagtttgtgacaatagttcttggctccccctgcccatttcagagtctgggaccccagagtaggtggaaaagtcacttttgcatcttgttttatttctctctcatattctgactacagcagttgcttggtagtggcagatttaatagtcacactttctactatttgcaagcgaccccaaattacatgatatgtaataaattgtcattttgctgagataagaatttgaaaaatctcatgctatgaggctgggtttggttatgagtcacttagtgaatgatttattgttttctccctattgtagcaatgcattttatggaggtagtgatatgttacagcaatattcttgaagatgaggattccagaagtctctggatgcatgctgtacaaatgaccagggtttacccagtgtgcgaggcccagggcaaagggaggactctcctctcttcccctcccactgctgagtatgagaaattaatagggaattgacctcaccttcctacaacacctttacaggtcactgacagaacctcccaaggagtcaggggtgctcttggtccacaattataagagatagatgtagtattatccaattagcccatggttcattcacctgttccaaatatctttaatgcttagtcctgactgcttctcttgggccaaattgctattgtcctaatgaaaatatatatctttggtttacatttggagatattacaggatttgaggaaatattttcattttccatccagaggtttaatgttgtgtaagtgctgcctgagtgtgacctacctgtatctaataaaatcattaattcagcaggccggaaggtttagtttctgttatacctgttgccagcagctcatcctgtcccgatgctgcccagaatctccagtgacagcaagacccaggaagtcttgggaagacagagtgccacttgcagaaaaagagtccattatcttgaaagccgctcctggagtcattgccaaaagcagtttctccgagtttatgctcaaaccttggaaggcttctgccaccatgattgaaggggacatggaagaagccaagccatcttggccagcaaatgtcaccagtcatgatgagcccctaatcctgatgggacttctgataagacgcttgtatgatgacagatgaggctacacacagcagtttaactcagtcatttgtaatcattactttttggccattcaataaccatcctgtgaaattattttctgaatttcccagagtagagataggagccaagttttaccccttttctttagggaagcctcttgacagttacaaatgctttaaggaaactttctgaggcgctctcagatcaaccttcaaagcccttactcacccatgccacctgctttgtttgagtgatgacacagtgttggcgacaagcactgggaactttctgaggccaacgtctctattgtcatgtagacatgtccctggggcaagatgcagggtgacagtgcatcttgctcttctcattgtgtgattgtggccacatctcctgacccagagcttccttctccagtagtgagctgtggtcccatgtgtgctggccaacaggtgtgcagagacactgacctatggagcctgtcagcacactgggaggctaggccagaccaggagtggcagaagcccttgggccagttgcctttcactgcaagcaaccttaactctttactccagtggatcatataaatattattttctctgtgtgtcatgatatgaaaaaaggtgaggaagcactggcttagcctctctgattctttgttttcctcttgtgtaagttgggatttgtttttcttatcttattaaacctttatgaggatcaaaggcttaaatgaaagggctttgggagtccatgtatttgtggggtgtgtcattggccacagagatagaactctatccctctatctctagtttactttcattggctgttcctttgaaaatgaggtggaattccacttttttttagcctttccaagtcataaaatcaatgtactgtacctcctatttaggttcaagcacttacataacactataattctgtatagtctttgcttcttatgacttctacaaggtgcctaccagagcagaatctgcttatccctctgtctacttgtgctgagggtacacactagtgtatctgcctcctcctggtctatcctgcactcacatcccagcatctcccaaatccccgtaggcctgcccttcctaaggacagcctttgctttctcggagcttgtgccgcatttaatggcaggtccttgccaaggggcgaggggatcccgagttgccataatttcagcatctgtgtgccagggtgcaagctgcttgggtggtttaataggacgacttaccttctttgccctgcagacaaatctcatgggtgcagaggaactctctccttcccttctcctcgatatacttttcagccaagtgctgtcttgttaagtgagtgaaaaccaagtcacaaaccaatatgcaataaaatgttaacactggcttctctggatgctggaggtatgggtgatatttattttctcctttagatcttcttgattttttttcagattttctatagtaaaaccgaaagtgtattttaaattatattctgaaagatgcactcaagatgtgctgcatgaaggcaaataacagcttccacattccttcacacttgccagctccaaattactgcctctgcctttagagccaggcgatttggagggggtgggagctgggagggactggggaggaggctgcaatgtgggccattgaatttcctctttttagacatcgctctggcagctaattccagggtgctcgtctgtatggtggcagcgtgactttcatgttttccccaaggtgttttatggcctttttaccgtggtacttgaataactttctcccagtaacttccagatagtgaaaaaatgtcagatgatttctctttcccccaccacgtttcttcccttctttgttgcagctctattgcttaataggcgtctccttgccatctctcccttctccttcctctctcttcttttctctctctccctgctctcccctccctctttgcctctcttcacctcatttttaaagcaaaataaagagagaggctctgaccttgctggccctggccatgggagagggcaaggagagcaagccagggcttatccgtgacccagatggctgcaagaagagttcctggggcagattcaacccttcacttttccagaaggtaattcaggtttcagagcgaggggaggctgaggtttagtggctgggttccaggcctcttccctgcaggaaagttggccaacagactgagcatccgagaaaaggcaggagggtccctggcaagtcaggtcagtcctgttacggggcagagccattttaggtagcagttttagatggccttctaggttgatctggaggcatctgtcatccttaatcaggagaaggcagcaggcatttatgaactggtcactccttctgctgtgtttcattccctgtccttgttctcgattgcaatcaatgtcatctccaaggggttctttgctggacagtagcagtgtgattgggccatccatcaaggttcctctataatgcctcacttttcttggtggcaaataaggagctggcgctccgttctgagagacttgagttggaatagaccctgccttctccagcctcccaccctaccccactccctttaactagttaactctactcatctggttaagggcctcagtgcaagcatcagcttctcaggtaatcttcccctgcctctcgtaatgaagtcagatccctcatcatacgttctcatagggttgtgtctgtctccttcacaatggataacaacatcaagatgtcaaaaggacttgagaggttgttggatggctgtctgctgccttccacactctaagctcctcagcctggaagctctaagagggtagtgtggggttctgctcacgaatgcagcccaactgccaagggcagagctcggcacataggagatactcaggaagtatgaatggaattaatgaattaatcttagctccaccccttttggctccagaaccttggacaagttactcaacctctctgagcctcagttcctgcgtttgaaaatggtaataataatccccactcagaaaattgtgggatttgtggggcaatgactataaagcccccagtatggtgctgggcaccgtgtgtaataggcacacatgaagtattggtttctttctcagtgattttttttttaaaaacatcccagagtattgcagcttaaaggtttaaagaacaaaaacatgtctccctatttcttctccctcctcctttctttgctaccttctcctgtggtgggtgaggcatagaatgggggcacagaagatcatattttgtgatttttttcactaacgagatgacttcgagtgaagcatctttccttcctgtgtttcagcttgctcacatgtgtgataggaagacacagataaatagtcttcatggcccctcccagctcccccactctgagtctctgcatgaggccaagggtaacattgatcaccattgttaacaatgcaagatgaatggaagcaacaaaggtgacatagcaccagagtaggatgaagccaatcaggctgttggcctatctattttaatacaagctgagtttattttagtaatacaggtgaagagtgatttaaaatatagcatcatgccaataccccttagtaaaagcacaaggatttctagtgtacctttcttcaaaagagcctgagggctttgtagatactgtctcattaattctttgagcatcccaaaagttggctgggaaagcatgatgagttctgttttacatgcagagaaacaaagcttgaaaaaggttaagcagcttacccaaggtcacgcagtaacactgctgtatctgagaacacagttctctagcacatcagcctatctctggaaatgagttcagtcatggtgaggggcctttgtgctgagtaatgtggcatctggagctggggcttcttagaggatagactctttatcctgaaatgacaggggtgacaagtagataaagagggattgaaaggtctggaagttaggagaaagtgttttgtccctcttcttcccctcaccctaagcatcttcccttggacaagccaaggaccaatttcaaggatccaggcatcaggctttgtggtggttgccatggaaacagtcgtggctgagcctgagaccccacagagccagctgccctgatggaaggtgtgtgtttctaggtcgacttcctggttgacccaaagggatctattgtcctcagttaggagaatgcagcaagcatctctgacctggtcagtttctttcttctgtatttaattcccaacccctgttccccaggagaatcatcacctgcaagggatttgtactgtagagtggcattcctagctggtccacacatcagaggtctgcagtcatacatcctatcctagtactcactggcaatgtgaccttgggcatttgtgctttccgagcctcaatcttttcatctgtaaaagaggttaactaccaaagttgttgtaaggatcacaaaagcagatgcctctgaaaggcatcagggagccctaagtcatggtgaatgtgcacacagttgcaatccactcttccacgctggagctcccttcttcctgtgaaagtgggtcacactctccccagggcactcactgcatgatttcaggagtcatcctggtaaccgttacttcccaacttgaaacatcaggtcaagagaagagccagttgttcttggatagtttgtagcctcttgtctaacatgtctggagactcctgggcctgctggtgggtgattatccttaccaggactctctcactccaaaagaaaaaggtcttttgttgatggacttggttttccaggctgccctgtctttgtgtctttgtgtctttgtatcgctttcagtatattaattatttagtgcttggtaaagctctctgagatcacaagatgaaaggcctgatggcagttcaaagccttccttttgattattattctagtcaacatattttggggggagaaaataggcttaagatcacagtggagtaaatttcataaagagcagagtacaagcaaaccacagaaatggacccaaacagagagtcatgttgccctgctaatggaagcactcaggtcttacgggggtagggagtgcgggtgtgttaagaatcaggccacctggagagtgatatttgctgtcttggattagtaaaataaaaatgcccattagtcttccacagctaccaaaagccagtgtgagtccaccttggccagttaggtagggccagtgaccaagcacacctgcagcaggggttcagggccaaaggagacattgtgacgctcatggatgagtcaggaggtgcttgcttgggatgctgaaatcatgtctggaaaggtgaaaatgcagtgagtgacctggaactatcaaattctgagagatacaggttctgaagaggaggcatcagctgtcacatggccttcgttataggactttggccatgaattatgagtcactagtacctgcatagatgtggtagctcaactgatgaaataggtccatgtcttgatctgcccctgcccctgcaaagcatgtcctacatgacaccaaaccaaaaacagccactgtgaaatgcttttcctaattttttctaaatcaatgagcaaaaaaaaaaagaaaagaaatcaacataaacaacagacctgaaacttaagttgtgtgagtgaaattaatatgcaattacaatccatcgtcattaacatgtttgttgaatggcctcaacaccactatcctaagtggttaaggaggtcagggcccaagttcaggttttgttctggcacaacccgaatcccagctcaactgctttggtgtccagctcagggaagacagggaccttgaggaggagggatttgagctgggcctttaagaaggggtaggatttaggaaagcagggggtggagaaggatgttctaggcagagattagcttgggcataagtttggagactaaggagtaatgggatagaatgtgaaaggaaggattctgaatgggaaataaggctgaaaaggcaaacagtggccagagtgtttgggctccagatttacacgctttagccattctggagcaacctctttgtgattcctttttttttttttttttttggtataggatagcctgaaggtaaccaaatccctaagggtaggcaccatgctaacaatttcctttattaatattcctcactgttgtgccttgggaaggggtacatgctttcattggctggcagaggtccttcaccattgagtgaacacaaaagttatacatgggtcctcttggggaggcaggaaatgcatgctgaagctataacttttgacagtacaaaagaatattatgggagagtaatttttgcttcaatatttgagctactaagaaagagcacaaacttctctggcaggatgggatggggcttagagaaaggtgaggtggagtgggagctgtttaattccatccaaattccgcccttgacactaatagctcccttctgaatgagccagctggaagaaaatgtgaaagcaaaccatagagaaacaaatatgtatgaaccagagaggaccttagcgagcagtgagttcaaaccgctcattttccaggcctagagaaggtatggggagggctatatgtttaggacaaatggtgcatctgcaaactctctcctttctctgaaatcacatctctgtttttcagactaaattaacaacatcgcccatcaccgctaactctaggagtcatgtaaatttactgaggtttcttttgctgaacaggtgcaggctcagcctagtgaatacccaaaccatttcccctgggctgccagtcccaaaaacaggcctgccctgtactctctgagagctgtgcctgatttgacatccagaccactatttatttggccacattaagctttgctttgtgtgacacaaaatcattgtaaacgaatgcattattaagtgtgttttcaaataacagggaaaaaacaagcagactgtcactgattgttttattgttggaaggaaaagaaataagtaaaacgtgtacaggcaaggtaggaactgttccaaagagcatttagaataggagcatttgttacattttattgatgtaggtttgtaaaacatgcttgccagtgagcctggggcattcatgtaaataaccatcacacatgcatagctcttcattacttatactgacacaagtatgatatatttattatattatgttcattggcttaggaataaatagacatgcagtgagacatgtaaaaataaagattggaaatacacagtgccaatcggctgcaatttgggtagttgtgatcatgtacatttggcaaagttaatgattaactagtgaataatagcgaagcagctctctgggagcacttttgatttctggacgttgtaattattgacacaagatgatctaaatatagaaaagagaccaagactcccactcattttggattctaaaacagagataggagcatacaattttaagaatgatatgactgatactgaaagactgtgtcatgcacacattatctcatgtggcccttacaaaaccctgagaatttttagaatatgccctattcttattctcgtcatcgttttcagaaaattgaggtttggcagagtgtgtgcttagcctgaagttaacagctaataagtgccagagataacaccttcctccagggcgctgatttcatttatttgacaaatatttattgagtgcctgctgtgtgccaggcatggagacatagcagtgactagtgcaggaggtacacaatgaataaaccaatatacagaacacatatatgtgtaagaaatagggcaaagggatgggagtggcttacaatgagttgtctctcagcaggatgaccagggaaattctttctgggaagttgacctatggacagggacctggacagagagagggagtggccatgtacctctgagtaggaggagcttcctcggctgagagaactgccagtgcaaaggccctggggtgggaatgtgcttggtgagttcggggaagagcaaggagacctgtgggactgagctccagcaatgagggaaaatggttgcaaatgaggttagagacagaatcaggagccagatcctgtggggcctttaggggctaggctatggcaagaaatttgaaagctatttcaggggctgcagtgtcaatctaactgccacatagagaacagactgaaggggggccctctttgagctcatagcaataatggagagatgcgagatgggaaaagatgagaaggggtaaaattcaggtagagccatcaagatttgctgatgaattgatgtggggtgtgaataaaaggaagaagttaaggattcctcattggtttttggcccaagcaaccaggcgagtattggtaacactttctgaaatggggaatacctggggtttaggggaagggaggttaggtttttggcttgctcatggtaagtttcagatgcttattgggcaataaagtggagattttgagcaggcagttggatgtatattctgtgtattctgttgttcaggggagagattgggctgaagacacaaatttggtaacagtagtatgtggatgatatttagagccatgaaactgggtaagatcactttgagagagagtttagatgcagaaaattcccaagttcttcaacttttaacaactgtcaaataataaaataaagatcccacagagttgttttttatgacaagcttacttacatgtcgggcaaggagaaattcactgtatggttttccaagtaagaaaagtcagagtttttaaagtcttacgaagagggctacaatgtggttctggttatttggagttgaaaatcggttctttgaactaaagagaatgaatgaatgcataggtttgtgtgagcatgggtaaacaagttatcttcattggtcagcaaagagtcttcagttaggtacaggaagggtctggtgtcccgcactcacttgaaatttattgatcatcagctggttagaaccagtgggataaaatataatactcagccatgacagttcctaagcaagtgctgccggaaaaggagacgtttcctcctctacagtttggaaaataaggaagacctggcaaagaagaataaagaggatcttcccactgaagcaggaggcaaccaaagactatgtggtgaccaggatgtgaaaaatccaagaagcagggagtgattgcaggggcaaatgctgctgagtggtccagtgaaacaaagacctagagttgttcaatgtatctgcagcctagggtcgtcggcgaccttgaggtggagtagtgaagacaatctagattttgttggatttaagagaacacgggaagaagaaggtggagacaggagcaaagacaaatcttttaatagatttagctgtaaagaagagcagagtaaagggacaatggctggagaagagtgtggcagtcaaagaagctttttctttctttataagatggtgcatgtttgtgtgactgacttggtagagagggaaaattgttgatgcaggaccattgtaacagcagatcccttgagaagagacgagactagcacctaagtgaagaggctggcactgtttaagagagtaaactgttatcctttacaacagaagagaaggcactgatacatgtaagtgggtagatcacttctcttttctcaataagctaagaaacaaattcattcactgagaatgtggaagcatatggggaattggagttttgagaacttgagaggaagtttgaactagttgtattggaaagagagagagtgaactgagttagtcagggaaggcaatgggattcccgggccatcctgagggtcttgaggtttctggtgatgaatttaaaatgaggcctgtcagcactgttgtgtgttcctccacccctcttctcccactaccacatctacctgctccaggataattgtaaagaaagaggcaaaggagttgagattgtgtgaaatgaaattatgatagagatgagccctggagctgaagctgaggacattagggggatgatacacagtgaaaaattcagagtgtcaagagcttgaggttttcactctgccttgataccctgcagtgcctagaaagggcttaagaaatcatcagaaaaacagcaacaattgtattgctagcaaatcaataatgccttcagtccaggtatatttcttcctcctttctcttcaggccttcacttgtctgcctcacttgggcacctagaagctcctgctcctatttccccactcctttctcatctacgtttcatctcccaaggtccaagagtcactctacttgagccagttggtctgcattcataccttcacccatatatctgcattgatgaggcccatttcactctggatcctcatattttcagagtggaaccctgaaaagacaaggctttctctagcttaaatggattgcttctgatggcatggcttctctttctgctagaaaatccttccctgcagtggttgggtagggcaagggtaaagagcttgatgggaacagacagtgtcttgaccctgtacttgttaaatgcagaagtattttgttctttatattctacattgatgtgtattctgtgaactttgactagcactcatttctgttccaatgcttccgattttggaaaacaactgcattcatgtgggctttgctttccttgatccttgacttttcaggtggggaggctcagccttttggctgacccccacattagctccctagcctcatccggcttatcacttgcactccctactctcaggggtaagattggagaccctgtgagcccactggctggaagaaattctaggagttcctgtaagggcaagttaagactttctgctttttttcaaccctgcaatattcaaccctgtggatgcctggcaagttattggtgttttgtgatataaaaggctttaagctcatgcttctgaagagatggcccacagtgatgtccatattaccttgctgggtcatgacccagccctcagagcccttccttttgaaagctttctttttttttaaacccctgaatatattatctggcccccattcatattaaagttatctgccattctgtacccattcacagattcataagtgctccctgaagtctagccccatctgcttggttcctcacatccaggaagaagttaatatcattcccaaactgaatggttcagaaaaatgacatcacttagaaacaggaaagtataacctaggcttagtcttcctgtcacttcaaagctacttaaaatttgagattagccaatgactcagacctagagtctaagtgaatttttattcacatggagattgattgtccgagtcttcccagacccttcccacttgccctattctgaagcatgctcagtggtggcctctgacctcagccattgtgtcgtgggggccctgccaggccctgtggagagctgaggaccaccctgcaccagtctgtggcctgtgcagagtggtgaaaggagcttggacttcagtgtcagttgatctagtcttttgaccctgatttcctgtctcctgctggctgtgtggctgtagtcaaggtaactaacgtctttatgcctcaatttcctcagctgcaaaatgaggacaaataaacttattcacaaggttactgtaagaagtaaacaaaatcacacatttaaagcacttagcatcataccggtccatatgtgctcgatacatactaattttttaaaaggctaataaacttaaccccacccaaagtaaccctacgtggctttgcattcacttctctgagccccattgcctatctacgaaacagagttgatgtgcaggtgaaatgagatggcttctctctgcaactcacaaacacagactctcacccctttcagtgcatttcctctgagctgttttgcagaaatgctgcagaaagatgtacctggcacaaatcaattcagttctaatctctgtagaccaaatataagagaaaagtcaaaattctttcctagatacccaagagccagcacttccaactcagagctatggaaagcagagattaaaatgtttttttaggaaggagaccgtggaatgcccatcctgtcccagttgcagggcacaagggcctttaataagcattgcctaagggcagcacctgcaggtaaaatagtggaggggtctggaaacaagagactgccatgggtacccaggccagagatttccttcaagtgtgtgaagtggggtttatcctaaaagggggttagaggtaggagaccagaacctgcaagagctggtacagggggtaatgtggaagaaactgcagagcaggcagactgggaaaatgcctctgctactcctgctgcctgccttttcttctttctcttcttctcctcttctcccccttttcctcttcacaaagtccctccaagtgggttaacagttaccaccagaatagcaggtcagcccattcaccatagaacatggcctgctgatatgaggcaaacctgggctcagtttctgcttccatcacttgcctctctaggtctcagttgatgcatctgtaaaacagagatgatcatttctatctcaaagagccacggtgaatatcatgtgacattatgtaggtaaagagtccagcatggcgtctgttccggggaagctacagaagaaatgctaatttccttccttccctcctccctgcactcagtcttgtgacacatctatctatgaaagagaactaattctcaaatccttccttctttaacaaaaaaggctttgtctgccgtaaaacattagcaaatagtgattgagcttgggattttctgggaagcactgtgttagatcaggcagtgcatgatcatttgatttgtagatatattgtaatgacttttcaccacacaaaatccacatgaggtgctgctaaggacaggaataatgcttctctgctgcttttctttcaagccttctttctctcatgcaaatcagaaacattaatccttttggctttctggcctcttggctttgggaaaactccggtcacctagcttcccccacaaccctgacaataacataattgttaagaactcataacttcagagtgcagtttcagccctctcattgataaggcaataacccaagcaaacaacattagaggaagttacaagtctgaacataaagtagggatggaggcattatctggacgagatgaattggagttctctataaagctgcacaaattattataggcagaatagactttggatagaactcttagaccaagccattaagtgccctggcttctagttcatctcccagagatcctcagcatggccttggtcagaacattcagacctcttagatctgtctgcccttgatagaaaatgtacatcagggtcctgaggtcaactcagtctactggtggctcaattttttccccctcatcttcccgatggatgtcatgaaagccccttataaacttcatttttgactgatattgagtgacagctaaaagacacaccccaagcacatggatcagtgttttctttatttttatgtccaggtcatagctccttggaatcaccaacaaacatgccttctccttctcctgattattttacatggaatctcacctggataatgaaagactccttccctttcctgtctcatcgcagccgatatggtaagtatatgtttaatatttacttgagatacactgtcactatctcataataaggactctgtgagtttcagtttgggattcatagtgctccagggcattccctcagctccctatatgcaaaagaagtctttctgagccctctgtctcccagtgacgctcaaccccgtggaccattccagccaggccattccagctgcattctgtatcctggtgggagccaagggctttgtgtctgccatatccctcctgcttagcctttatggtatatagtgttccagccatccccttatcaatcattagaggagatgcttatttgcttcttgactgtagcttgctttctggttctaacccacagtgtttctagcaatcacaatctctctctctctctttttttttttttttttttgagacagagtcttgctctgtcgcccaggctggagtgcagtggcacgatctcggcccactgcaagctccgcctcctgggttcacaccattctcctgcctcagcctcccgagtagctgggactacaggctcccactaccatgcctggctaattttttttttttttttttttttttttggatttttggtagacacggggtttgactgtgttactgtgttagccaggatggtcttgatctcctgacctcgtgatccgcctgcctcagccttctaaagtgctgggattacaggagtgagccaccgtgcccagccaacaatcagtctcttaagaggggattattattatgagcgtcacaggtcttccagggccccttacagttaagaagctccttaaagtttcccaaacatgttctttgatattattttggttcatttgattctgcaacagcatccgacatgaagagaccaggtccaattacatttttacagatgtggaaactaggtttaataagatcacacagagtggcttctccagctaccaagccagacttcttcccctactttcattttttctcccaggtaccacctacccacccgggtaggtcctgtcctagcagccctcaggaggctgcctttacatggtataagattcctccttctctgtgctcattctaacagctcatagtagctgggtctctgcaatgagaagatttagaggagagaagaagcatttcaaatgaacattttaattctcttgaactcctctagggtgaacaccataaggacagacactaagctttgctttccactttattctatcgcatggaagatatgcataaagccttattagtctttcaatggctactttcaatggcaataaccacagttacttttgcaccagcctcatatttatgatgaatgaatgcaaaagtcctccagaatgaaactcattcatcaggcctgattcaattaagtatttataaacctggtgtggcacggagttctagattcccttctgggcatatttacctattcctctatgcagtctatacccttgggcctaagctatttaaaatgcacctaacagagatgttccactcactatagaaaagcttccagtccaaagcctgctgtctctcatctataacgctcttggttcatattaactgtacctttctgtaccatattttaaacttaaaaaaaaatccatcaaaaaccctggggcagtttataattatcttctgtgctggaatgtttcctgtgattcttaagcagcccttgcaggagagaaagatcagtggtcgtcaggagattccagataagaattacttcctgattttatttaaaccagacactgagtgtcatcttatgataagggcaagtatctataaataattgaaatctggatcttttcattgttaatgctttgtaaccagatttgcgatacaactggtcttcaggtaacatttttgattttgctcccaaagtcattcagtatctctacagaaggacaatttttataaaatgcagaatgccccaaggggtaaatctacccactccatgctgcagagggcaacatatttgttccctgtggagcatcttataagaggttgcaggtcaaaaggagaaaatcatgaaagcttattaagctgcctcctacccatggcttggccctgataaaccatgtggtgctccctgagcttcatcctccttatctgtaaaatgagggtgaaatggcatgccaccttagggcaaaggaatcgatctggaggtttttcaagatctctttcaaactctcctcctggtctggaatcctcatgatttcccttcttggcagagtagaggacccaaaccattggcagttactgcccaagttctgggtaagagtacccaagtcatcaccatcgttgctattgatttatggggaaggaggagctgattcttcattggtggttccttaactgactatggtgggcattccagaggctttacatctttctgccatatttaattcagctgagacttatgaagacattaccaccaccatcaccatctctgggtgcttggccctgtgcctgatgtgggaagtgatgcaaacataaagacaggtaagggttggcccttccctttcactgctcataggacagacaaatcattccataggcagctaagcccactgccatagtgtccccggtgggctgacctcagagtacagatgttgaggacttgccccaagacccactgcagaacaagctaaagacagagctaaggccaagagtctggtccccttaaggatgttggtgggagctcagcccacatgtctatgaatcaaagaggccagctgagttgggtgataaatccatacctttcaactgccgtgaaagacattttaagaaatgttaacaacttcattaattttaaggcctcaaacttgggcagataaatttgactggaaaattgctgcctgaagggatcgttcttcagacagtgagaagtcaccaagtctctgcaagtccatcatggaagtccacgcttggttggctgtcttcacctgcatcctggtgggaggtcgtcagggtgggggagtgagagtgagcatcaacaacctgaccgcaggtgtcctgatgaccactaggctaggcctctgttgggtgagctgtccagttctgaattggaatggctttcttttttccagtgttttatgagaagagacaaggtggaaagaggctaataagatttattcacccccagtctgtaattatctgcttgaggaaaaagtttgacctacctttttgaaggctccccatatttcttctaatttgcattggggcctaatatgctgtgtaaaatatattctcttccgtggcttttgacatcagattccagtcgtttctcgcctttgtgttgaatgacgagcgcccactaatttcatcatcagcgagcagagggctgcacattcctcccctaaggctttgagagggaggacgtctaaagaaagactttatttttctttttatcatcagctctcatgcccttagacttatttataggcttggctaaaggattaggctctaactacctactcagataaaaatctgttccatcaggtagcaccagatgctaaaagattgaggccaccgggggttttgaaaggcagttttgatcaccttgagttttagagccacagagacagatggtatcctttccacctttaaatcatatttgcccactctgggtatgggaagaatcacatcaactttttaaacaggacgatgaaaggttctgcccatatgagcaggagaaagggacttttcatttatttaaaaaaaaaaaacatgatacattgcaaaactctttttcacccacttttctcatttaagttgtattataaaattgcagtagatgaaaattattttatattttatttttatggaaatacaaatcgagggtcaaaggagtttattaatgtgctttcattttacggagtaggtgagccattagaaaagaatgaacctggactttctgactctctgtgtgctctttctatcatatcacaaagttatttcaaagatgagctttccctgcctggagagcatgcccacttcctggatgacctggtgtttagctaaatgatcagtctgatgtctaagaccttgggtagctatgggaccaagacttgatatcaccaaatggagactatcccaggcaggccaagtaattcaaccctttctaaccatgagtggaatccccttggcactgtaggtagtcttgtcttctctaccctccctccccatcccagactatggtccctggggattgacttgtgtctccccacaaaattttgttaaagttctaatgccctagtacctgtgaatgtgaccttatttggaaatagagtctttgcaatcaaataaaaatgagaccatactggattaggatgggccttaatccaatatgattggtgtccttataagaagagaaaacacaggcacatatagggtgcacaccatgtaactatggaatcagaaattagagtgatgtgtctacaagccaaggaacaccaaggattgcgggcagcattgggagctaagaggaaggcctggaacaaatccttctttagtgcttcagagagagcatggccctgcctacatattaactttgaatttttggcctccaaaactgtgagaaaataaatttccgttattttaagccacccagttgatggtactttgttatgactgccctaagaagctgatccagccccctaatgtccaaaacattggctcctggaaaagaaaatattcttcccaacatcccaacatctaagcacaacaaaataattgttagatttgaataaaagttttattcaaactttgtctgctttccagtccaaggagacctatccagttcaggggctggtgcttttagaaagaaaaattagactttttaattactttccctgccactgccaccatcaccacccatcctgttaatgtatcaatttctttgattgaaaagactaggtaaattaaatatctctctctcaaaaaaaaaaaatcagcctaacacagaatcaaaaatggaaaacacaaaggacctctggctctgtataggatttgcttcatagctctggcaggaagtcagtttgatcgcatttctgaaattacgtatttaatgtggctggctgtgatcagccattctggtcctcaggagcactggtgtcagtgaaaagcagctcccttgtggactgttgtcagggctgaaagcttccttaccaactcctctgccccttccaggccaggtctttttgtgttctcttcctagccttgctccactgagctagggggtcaagctctttcctagctcatgcctctgtattttcatctacaagcttgataagcaaaagatctctgcatgcattcaccacaaagtctgagtcccaaaggggacagtaatgctggcagtcacacaagaccaaggatcagggaccacctatcacctggagggccctgacctgctgggagccaatatactcaatccatggaaattcaatataaaggagttgccttaggtgtttcgaggagagacatgtttaaaatgctcctcttggtcatatctctttaaaacaaagacacatagagccattcataaatatgaacaatttatctctatgttggtggcaagttgagtaaggaaatgcagaaagaaaaaacgtcagaataaaatataataagagaatgaatgaccatgtgacacaaaggtgagaaaaacaagtcagaaaagatccattcaaaacacttttcacaaagtgggacagacactgacaaagggaaacagatgatgaggggaaggggacagagacagagagagacacacagggaaagagagagaaagacacaaaagtaggggtcgcccttggctctctgactgccttttcatttattctttttcccgttgacatggttcagctctcacccctgggcaggtggctccttagtgcttgcttcagtcttgacttcccccttcagaggccctcccacaacccccaccctgcctgcatcatttcccccttagcacgtctccaccaacacagagaatgggagaagggatgtcaacagtcgtggagtgccgagtgtatgcttagttgtgctctagacatgtcagtgataaagacaaataggacacatttgcttccctcaaggagctctgggggaagaggtaagcatacctgctctttgacaaatgcagtaacagaggcccaggaacacagaggagggaggaccaggtctgtagaggactcaagaagggagatgttttggagactgcggcagctgaactggaccttggactctagggaacacagagagtcaggagaagagtgttctggacaaaagggatgcatgtgcaaaggtgtttgggaacaggtcaagctctgtggcaaaggttgtagaggacctggggtgaggctggagagacagttactctgagaatgctcaggagttgggcatggtcctacatatgaggcataggatggaaaagaaagggaaggaggagaatctggaagagattctggatataaggtgagcaccacttggtttcctattcaggagaatccaccttgagtaattgagtggatgaagatgtcattgactggaacagagaagagaaacatttggcaaggaaagatgttgaccaagacatctagagggaggaggaaatgtggtgagatccaccgtaatcaagttacatttgaaatgccttcaagacagccaggtgaagatggccagtagagagctgtaaacccaggtcttggctttgaggagagaagtggatggagagttattagcagcaagactgaggttgaggccaggcacagttgctcacgcctgtaatcccagcaatttggaaggccaagcaggtggatcacctgaggtcaggagctcaagaccagcctggctaacatggtgaaaccctgtctctactaaaaatacaaaaattagctgggtgcacatgtgcctgtagccttagctacttggaagtctgaggtaggagaatcgtttgaacctgggaggcagaggttgcagtgaggcgagagtgtgactctgtattccagcctgggtgacagaacgagactccatcatacacacacacacacacacacacacacacacacacgcacacagactgaggttgaagctggtgattggaggttgaagacccagaggagatccaggatgtttcatttgagaggtaagcagaggaagaggagcatgaaacagagagatgaagaaatgggagacaggaggagaaccaggagatggtatagtcacctgtgttagtctgtgctcatgctgctaataaagacaaacctgagactgggtaatttataaaggaaagaggttcaattgactcacagttccacatggcttgagagacctcacaatcgtggcagaaggcaaggaggagcattttgtggtaagtaagatgtgcttacctcttgccacatcttacatggtggcaggcaaagagagcatgtgcaggggaactccacattataaaactatcagatctcatgagactattcactatcatgagaacaacatgcggaagacctgcccccatgattcaattaccttgcacagggtccctcccatggtacgtgggaattatgagagctacagttcaagatgagatttgggtgggggcacagacaaatcatatcaacagcaaagccaaggaagtgaggaatttttagatgaaggaatgttgtatgcatgtgtgatacccccaacattccaatcagttctgtggagacagaatctctctctgggtctaatgaaccatcagtacctaataggaaggtttgctcatttttagcagacatgacatggctcttggatttaatagagcttccttttggataccatatagcaagtattcacaaccagcagctggtgaccgcactataaccccaaattagaacagtctgggaggtggtggacctcactttatccccatattctcatggagaaaatttttatgtgtctccccgctacttggtgcctctgatgtcacacttttccttgtgtcttagttatttgtggtcctgcgttatcactcttcctagacgttaagcatttaaacgtcaaggaattcacatcttgtttccttttgcacacctagtacttctctcatgttgtgtactcattgtgtactcaatagaagtaatggcaatgtctgctcagcagttcagggacaaatgaggagcaaactgaggtctcccaattcccaacctacagcctttcagcccccaaagttctctgttttattaaagggcagggacattcccaccagccctctcatttctagtcatattaatcagtttcaggaaagaaatgtgtctgagggggagaccagttcctgagctggacttaatttggttgaggattcaaagatgtgattttaactactttgagcaggcttgctttttttcttttcttaacataaaaaagcatattcagcagacatgagtgagctgaggaatttctcttttgacagctttgggacatctgagatactgtatacagagcacttctaaccaacctagaaagacgtgtgtccaaaacatgttcaggaaaaggactgatcaagagtgagaaaaatgagagaaaatcctcttaaaatgttttgtcgagagcaacctcaggtgcaaaactttgtgtcagaagagacctccaattcacaggacttgaaccagcccatttgggtagatgactagaataatttggtctatgagaagttcatagaaattgtgagctgtcagggccttctgtggtctgatcaaatagccacatctgtaggatgaggaaacaggcctagagaggttagtgatctccccaggactagcagcaaagcagagattcaaacccaggccatctgcttggcagagcccacacctaacctctctaccatagaggcaagggttcattttcttctcaataagatggctcacaaagtattttctcacatttcagtcccatctgttgctttacacaactcatcccttgaataccttgggtttccagcccagcagagttttgctgccccacagattgcctcagtgtggggtcagggccttcctggtgtagatgaacacatggccacactcagtctagttgcctcatagtcacttggagagcaccttaaaaacaggattctggtgagggtattcactggactagagaactaggtctggtaatcctagggctttaactcacctctgcattgcctgtttaaatcttctctgggccaggcacggtgattaatgcctgtaatcccagcactttgggaggccagggtgggtggattacctgagatcaggagttccagaccagcctggccaagatggtgaaaccccatctctattaaaactacaaaaaattagccgggcatggtggcaggcacctgtaatcccagctacttgggaggctgaggcaggataattgcttgaacccaggagatggaggttgccgtgagctgagactgcaccattgcactccagcctgggtgacagagcgaaactctatctcaaaaattaaatcaatcagtcagtcaatctcctctgtaacatcccaacaaaaggtcttccagcctctgcctgaaagcaacacatggaaccacagtggggaaaactcatcttgggaatctgagatgtggaatgaattcccagctctgattcttgtgagttgtattaccttcagccactacctactccttttggttgtctatgtcatctttaaagtggaggtgatcaggattaccaactgacagcattattatgaggacatgacgacagatctgaatgtgcccagggcacagcaaaaggtgggttttggtggcatggctccatttgctctaagcctcttgcttaaaactcttttaagtccctagttttgccctctggaacttgaaagcattttgcctttaatcacactagtatttgagctgggatttaattcatgcagttcagcttcaaaatttatacaactatactgaattaagcaatatcagttcttcacctgcctagaataaccttatctcctcctctgttcttagcaaacttcctagccaaacccttactatctgttcaaattgtttcatccttcaagatgcagcccagcagttgctttttctgtggacctttggtcctcccaggcaaagagcctcccttgttctgttttccctgaggcctcttagagttaggtatgggcaagttcatcccccaactggactgggacccttccctgaagggtagaaggtctgtgctcgggcagtctggtaccttcctgtgtttgaaaacagggaggaatggaaccccatgttcacattaacacccagtaggtcctgtctctttagagacagaagagtaagtggggaggtccgtctgcatattctggggtctcccttaaccaccaggcttctcctgttgtcatggatgccacattgctcagagttcatctccagccttctggtttcaggaataaacccatttagacagatgtcatattgagcagtgatacaactgctaaggatttcaccatgccctctggagcctgcttcattctgttagagacttccttacccaacacacacacacacacacacacacacacacacacacacacacacacacacacacattctgcatgagtgtttcctggaaattgcaagcagagaattaaactggaagtccaatctgggttctggtctcaactctcttactgctccaagccctaggccatgccaccttggccaagtcccttcactcttctgagccttaattttcccatctataaaatgaagaagctgagctagttaacctcagaattaattattttcaattttctgttctatgattaagagcagagtcctgtttttctatctgtaacatagtaatggtcacagataagagaaataagaattcagctttccgtgtgtatctcccactgcagtgtgcacatgtgcacgtgcgcacacacactgccctctgaggctgtgttcatgtaattgattgatggaaggagacttggcccttcttctcttcagcttgattataagtgagctaaacagatgtcttgaattgggtgattggttcccagatgcattccagggagcaggctggtgggaaggaagtgaatggtttcaagttctggggctctatgacaaatgaacagtggttgtgggcagagggggtaggggccaggttggatacttagtgttatgaagcaagtgaccagatgttgatggcagctggtggattaataacaaaggtgactggtgagccaaggagataatccagaaagggggagccacagtccctaatcatcggagcctgggctggaagtcaggccccctgggttcctgctgaccagctggctagagtgaagttagagagtttattttggccacctgcccaaaggggcaattattcttagcatggtagagatggaagagacctgagaatcattttattcccccactccattttacagatgaggacactgaggtctggaaagcttaagtgacttgtgtgaagttatatcacagagccagagctagaacccagatcatctcgctggaggtcttccaaaggcaagctcaatcagccatcgcaaaggaaatattgagagaggagcacacgtttctccaccccttttccttttatgcttccagctgaaacagggcttgaaacaaagttttcttcctgctgtgctggatatactccctcttatgtgctctctgccattgctgactcctggagacacttaaagagtaacagcaatgacgcgcatcattaaataaggccaaattgtgtgcaagtcaccatgcagggcactcaacatacactattgcatttcaccctcctcacaattccaggaggtggtccctgctttaattcttatttttcagttgaaaaaattgaggcacaaagggattaattttctctgacatgtggagctagtaatggcacagccaaatttccaacttgggagcctgacctcatgcaggatctgtgcttgcagttactccctgcaatgcctccccagacactctggtgcctctcccagccccctgagaggttgatataaaatagggcaaggaaagaaggatgtctgttctagcctgcttctccctgggtcctccaaggtcaagtcaggtcagttcatccccaggttcctggtggtaaatctgaggcagaggaagacacagtgctgtgtctgcatcacagggccaaggtggtaagagtatccatctattaatatatggtatctcagggttttgaaagcatggcgacattcattaccttatgcaatcatcacagcagatatatatttatatatatatatatatatatatatatatatatatatatatttcttttcttttctttttttgttgagatggagtctcactctgtcacccaggctggagtgtagtggcacaatctcggctcactgcaacctctgcctcccgagttcaagcgattctcctgcctcagcctcccgagcagctgggattacaggcaccagccaccacgcttggctaatttttgtatttttagtagagacggggtttcactatgttggctaggctggtctcgaactcctgacctcaagtgatccatccgccttggcctcccaaagtgctgggattacaggtatttatattatttttatcaaaatcattagtgtgataattctccctggtttatccatgagaaaaccaagactcaagtggttaaatgaattgccccaagcacaaggctgatgcgcctggagctgggaggcttcctaagaattctctagtgaactttcccctttgcttctggccccatgctttcccccaccctgttctcactgtggctcctggcctgagaacagacctgctcaccagcagggagcttccagcaaccatcaaaaagcagtttgttggcagaagaatacatgcaggaggagacaacccaaaaagctttattggaggtgagttgagccatctgatcattgggagatatttgaaacgtagccatatatgtttttgccaatttattcaagaaaaaaataggatttttcagaatttttctacttgtttaagatattgttttttgttatacacagctttgaataattataataataacaatcacaggattagaaacagaattttagtaccagccttgcaaccagccactgtgcattctttgatgatccccatcattctccagcctttcccttcctctcagaggtctccaaggtccctcatgactctgaaggcctacatttgggacattctgatgaatccctcgagcaaagaggatcctccctgtgcctcaagattagtggccactgagagagttcccttgagctgggtacaatctttaaggactgacagtgttttaagaatgctaatttctggggttccatttaatgaaatgtagctttacgtgtagatctctctaaaggccagctgtaagagaattgccgtgtatgcatgatgtttcatatggttctttattgaagacacttaaccaggcttgtcaggaatacattggcattttcctatgccattaagaaaaccagtctcagctggaggggccagtaagtgaagcctgaggatgcatgacagctggtggttcagtacgtctgaccagctcccgtctggtgttccctgaagaggtgacattcagaaagacttctgcaaccaggagaaatgccctccacactgtatgtgaaggactcattaatcagtggcgtggccctaagtcagtattttcccttgcctgggtcttgctttttttcacttctccagtgaagaaatggttgacctcaaatgtttcttaaagttctaacagcctctgactgcaaatgtcacctaaaggcaatgccaaccttactttggtacaacaaaatcctaaagaaatggtcatggtcatgtgccatcacctccttcagattgacaattggaatactatttctcaggatgaacaggaagctgtgttcacaaaaggcatggttatgcaaattcggaatcagccaatgtgctttgggaatttctccattctaagcacatgcctcatcatcttaagccctttcagcagttctgggaaatgaggcttctcactgagatgacctgactgaggcttagcacaaagcagtgtcccatatcacagagctgacaaatggcagaattagagtcaaatctcaagtcttgtgctctattcctgtgaatcattcatgacaatattaaggtcacttgatgaataagacatatggccatagacatatgggaaaagattgtacgactgattggtatcacagacatcaccattcaacaagtgaggacagtcaggcccagcgtcaggctctgtatcccagtagttagacatcaagtcaagataactggagacagaaaagcatttttagcaggaaaataaccccaatacaaaatcacaatcatattgtcatattttaagtgagtggcaagcccgataattctgttttcagatgcagatcccattgaccaagtattcagttaaatgaattcttataggccccttctgaaaacagatacatcctgatggccacagaaactttgcccacccaccctcagttttctaaactgggatcccaatcagacccaagaaacacagcacatattctggaagacatcagtgatatggcttggctgtgttcccacacaaatcacatcttgaattgtagctcccataatccctacatgtcatgggacagacccagtgggacgtaattgaatcgtgggggcagctttttcctgtgctgttctcatgatagtaaatctcaggagatctgatggttttataaaggacagttcccctgcacacacactcttgcctgctgccatgtaagatgtgcatttctcctctttcgctttctgccatgattgtgaggcttccccagccatgtggaactttaagtccattaagcctctttttctttataaattacccagtcttggtatgtctttattagcagcatgagaacagactaatacaatcaagaaacctagaagggaactttaagccctgggctttattgcacttgtggctttggcttcctgagccgtacacccactgagattcagacttagatcttggtgatgtgtcctctgactcagtcctcacctagggcatcccaggcccaactttataggtcatatcagaaccttcaagatagcgaagacactctggctcctgtcctgcccccagctttgccctgcctttccctctctgggcccaggtcctttcctgcctcacttgtagagcttgtacattgttgtagtatgaagtgtggccatttagaatatcgagattctaaatcagcacattggctgattcagaatttgcataccatgcctttttttttcagcacagcctcctgtccatcctgagaaatagtatttcaattgtcattttgaaggagttgatggcacatgaccatgaccatttctttagtattttgttgcaccacagtaaggttggcattgcctttaggtgatactttcagagtcagtggctgtcagctctgcctcacttgtggagctcgtacactgtttcctgcctcactgcagccacagacatgtccatgtctgtggctctacatgagggaagctatgtctgctgccttttctattggcaatcccatttgtgacctactgaaatcagggcctcaggactcacaggaaggaaacacatcagtaaaagaccacatagccccttcctatctgagtaacatcagatgtgacttcacttctctgagctccaatgccttcatctgttgaatggagataagaatcctgcctaattcatagggattaaataagatgatcatgtaaggtgcctggcatggtgaccagccccagtgagtccttggcgagtgttattacttatgaatacacttcccacacgccttcacagaagtcctctccatgggggtcagggctcttctatacacactacagcatgcgttgccaggaacaagaaagtaagacctccagctttacttcataataagagacaaaatcaagaaggatgaagtgttatggaattgatgggcatggcattcttctcttttttatgactcttcctttcattctgcagtatttgcttccaaagctcacggtggcctgaggctgcaaggcctcatccaaggggctgatgtggacctgccccagggggctgccctttaaggccctgccaccctacattcacctggaaactgggcaatgttggaggggatgtctttaaaactaaggggagctgctggtcctctaccttgaaactgacccaaggtgatttagaaaactagtaggatttaggaaactagtctctgggttaacaggctcaaggttaaggaggcataaagggccttgatccaagggattctggggaaatctgaggtcagtctggatacaaaggagcattgttagatattctgagcccactcaagaggagacccaagtgtccaaaatgcaccaagctccctattccccttttgtggtgttatggagaatagctggaacctacatgcaatctccttgagtgtctcggcctggtacatggccccggttggaaggcctccatctctgcctgagtaaccaatgctgggcttcctaggcacaggccttgggcctgactgctttgggagtctcacacattcctagaggctatatttccaccctcaggttcagagtgttcaaggtggtttgtcattgacaactcttctacagccagggggttttgataagggagactgggtatgtctttgggcagggtcaccaccgtggttttctgatacttaccacaacattttcctgaatggctgtgcttcatactaaaacaatgtctagaagctaattgttaatgaattcagtctttaaaaatgtgattcatatactgggagatttcaggaagtgagtatcagatgataaaaatgcatgaacacacacacacacatgcaggtgtgtgcacacacactcactcgttcatcctgcaactattatgtgcaaaactcacataagctttcctttttgtgtttttgagatggagtttctctcttgttgcccaggctggagtgcaatggtggggtctcggctcaccgcaccctccgcctcccgggttcaagccattctcctgcctcagcctcccaagtagctgggattacaggcatgcaccaccacacctggctaattttgtatttttagtagagacagggtttctccattttggtcaggctgatctccaactcccgacctcaggtgatccacccaccgggcctcccaaagtgctgggattacaggcgtgagtcactgcacccagccaagctttttaattctttgagaatctggaggcaaaccaagtccccattgagtgtgatgtacattcacccttcttccataggaaatctgcctcttgggatgacaacaagtccttgtttaggggcagcatctcctgagcagaggcaggctgagtggtctgtaggtttgattgtgtcggcccagggtaagcctatagaatcactgaccttcagagatgaatggcaccatggagggtacatgctccatttctttcatcttccaaatgcaaagaaacaggcctagagacagaaatagacctgctggggtctcagctgctctgtgcaggaccaagcccagaaccatcctcactgctctgctagagccctttcccttcatagcacttgacgctcctctcagctggcagatcttttccagaaggttccattaccttacctttcttccatgatggaaataacaagaaagtaagtgacaatgatttcacatatgtgataggcaggtcctggaaagtgtgtctttttctcaatgctctttttcaatggtcagattctcttgggttaaaacaaaaaaaggtcaagatctctggatcctcctgaaggtcatagtcattctgcaaaatgggcctgacatttagaaaatatagatctgtcccctatcatgaagaaggcttttcagatatgaaaagtttacaggctttgggtctaagagtaaccaagataaaacacttcattggtttctcatctattgtgtaaattaatcttcagccctaaattgagattctgaagctgcaggagagagatgaacaacactggatattctgcattatccagttctaggtcactctctgggtctgccttggggtagtcctttcatttgggggcaagaaaactttttaagcctcagcttcctcacctatagagagaagaagaaaccgtccacttctcagtgttgttctgcagatgaggtacagtgatggaaggaaaacacccaggacagtgcgtggaagaccgccaggaggggctgagggaaggtagtttcccacccctgcccctgggtgggtgtggacctgcctctgcggttgggttgcttaaggctgagcactgtgctgaagccctagacccctctgaatccctcctgtaaaatagattctacagtctctacctcataggcactgagttggaagagggtgaaggagagagattcaagaagcacactaggtctagaacctcggaagaggcccaaggaaaataagacttaacctggtgttttaggcaagtcccaaggtattattgcccaagaggcactgaggctagtttgagtgagaaaaacctgtgtctccatgttttgtaagaaattaaatcagaatgtagaaaagcctaattcagtttcaaccaaatgagtagtaatattaactccattcctatttaaagctagaaagtacagctttaacagctaaaaggaggttgctgcggactaagaattacagaaggaacgcattttaatcggtacatttgcatagcctgttttactaggcaggatctggcccaaacacagccaattatcacacttaaactctccagagttcaaagatccaagaattaatatgctcggtgctgggattgtatattgcactgtctgtctgttgtatacacatgtagggcacatttgccaggcaggacacaactcagacagttggcatgcctcacctctgtcttgaatagaaacaggtcatctttcattggaagagaaaaatcaaggtaggggatggccgcagaagtcgaagctttgggaaaggcactgataattgtcaatgtgggatgggagtggctggtggctttctcacctttttactgacatgaacatccaccaatgtggatgtgtctttttgaccctccctagaggagttacatttcatggctacgcctctccttattagtcatgtttcatggctaatccttcctatgtcactttggtgttgcaaagtacaaaatgttggaccagttttctctttgcagtctgctctgaaaaccaggtgtcttcaagcacatcttgaagattaaggcagcctgtggttcctggacaccaactgtagagcaagtggcttatcaactcaaacaaagtgagagctacccatttcagcttgccactatgaaggcaagttgtctgaatcgtgaaagggcaaggagtattaaccttagggccagaaggatggcagctcctggaaagcagctgaggagcagaaagacactcaatagaagtgtaattgaaggatttttttcttttctcctacaattgaatagtttggttagtgttaacaggaatattttgctcccactctgcagcagggccagctgtctatgggtgtggacacccattgggagacaatccagtggccggctgcctgccttagaatctgcccccactgtattctgaaatttccaacaccagaattgtcttggagattggggtagtagtagcctcagaagcagctgttaaaatgcactgctttaacagcttttggtttcttttggtgagaaaaccaaagttcacacatgagaggtaactagtcatgcctggactcaaactgaattcctcatattgtctgtccaatatctatcacattatcccattttttcttattcccacggcttcggggagaggatgaagtaagaggtggttgaacattttgcatcttggcatcttctgttaatccataagccagctttgagagcccgccatggcaaagttcttcagccactttggggagtggacaatgagcaaggaaggggaagaaaagctgagtggcccatgtaccctaaaagtggggcaaacgtggaatcattggacagaaagagtctgcccagggaagctcaacaaagtacaaaacatcccagggcatgggcccttcctgcctctcttttctctctctccttacccaatgaccctccccaaacactccccaagagaaaataaaccctgactcattgtcatagccttggccctcttctctggagaggagatcgaagggtagattatagggctggcaaagcaggctgtgaggaaattccagttacctatggcctttcccttatcaatcagaaaggacagggcctggctagcatttttcagagcatcaaatatggaccaggtccatttttcataggcagtacttttttattatttattattttattttttattttactttaagttctgggatacaagcgcagaacatatggatttgttacatagatatatgtgtgccatggtggtttgctgcacctatcaacccatcacctagggttttttattgtttttatttattttattttatttttttttttagggaaaagggcaagcaggttttatttctggccaggcatggagaaggagagagcacttgctctaaagacagcttctcccagagcagtgggaagctggggaatgttacagggttagacgtgggtcaggggctatgtaagcttgtgttgggaagaacttcagacacgcaggtgcagatcaggaacatgctcttcatacgacacgtgtgcagaaagtggcagtgattctcttctatgggtggggacttttgcattataatgatacgctaatgatctaaaggtgacaggggccactggttctggtttgctctggttttgtgcaggccttatcctcctctgcaaagcatgctgaagttcctaggccatctggaattctttttttttttttttttttttttaatcctttaagttcttggatacatgtgcgaacatgcaggtttgttacataggtatacacgtgccatggtggtttgctgcacccatcaagccttcatctacattatgtatttctcctaatgctattctttccctagtcccccacccctcgacaggccctggtgtgtaatgtttctctccctgtgtccatgtgttctcattgttcaactcccacttatgagtgagaacatgccgtatttggttttctgttcctgtgttagtttgctgagaatgatggtttccagcttcatctatgtccgtgcaaaagacatgaactcatccgtttttaaggctgcataatattccatggtgtacatgtgccacattttctttatccagtctatcattgatgggcatttgggttggttccaagtctttgctatcgtgaacagtgcctcagtaaacatatgtaggcatgtctgtttatagtagaataatttataaacctttgggtatgtacccagtaatgggattgctggtgattgctggggattgctgggtcaaatggtatttctggttctagatccttgaggaatcgccaccctgtcttccacaatggttgaactaatttacactcccaccaacagtgtaaaagcatttctatttctatttctccacatcctctccagcatctgtttcctttttaatgatcgccattctaactggtgtgagatggtatctcattgtggttttgatttgcatttctctaatgaccagtaatgatgagctttttttcatatgtttgttggccacataactgtcttcttttgagaaatgtctgttcatatcctttgcccactttttgatggggttgtttgttttttttctggtaaatttgtttaagctctttgtagattctagttattagccctttgtcaggtggatagattgcaaaatttttctcccattctgtaggttgcctgttcactctgacccatcatctaggttgtaagccgcacatacattacatgttcttaggcagtatgttttaccaccagttcttacggcaaacttgagtggtaattatcagcctaatgtacaggtgagggaattaagggtcagagaggtgagttttcttgcttggagtcaccgggctggtaaaagcagagccagacttggactcagccctcatgggtttcttgggaaggctctgcccactcaccctcaggccctctctatgtcttcaggtaacttcacaagatgcagagcttctcaccattcaacctgttagttagctttgttttttacctgccttctctgagaacatctcccgtaatatgagttacagaaagagcacattttattctcttaggtcccttttcaccaatacagagccctgtggtattgacaactgatctcccttggacagggcaaaggatgtggggagatgaaggccaacctcctagtgtggagtggagggggctgaaaagtcacgtttgggaaatggttttttccattgacccttggctattattgcaggtctggagtgcagctttgacttcccctgtgagctggagtattcccctccactgcatgacctcaggaaccagagctggtcctggcgccgcatcccctccgaggaggcctcccagatggacttgctggatgggcctggggcagagcgttctaaggagatgcccagaggtaagggagaggctgctggtgatgtcctgggtgggtcagggccaggctggaatacctatttctgtttgaaatgatgagacttcactcctgttctgctctgtttactttgaaacctgcttttaatatctgtgactttccatggcttcttgggccatgcaaggaggggaggaagacaagtcccatctcaagatcagcccaaacctttattctttaacaagtaataaaagtagggtttcataactctcttccatgcagatttccctgcaggagaaagtgctgatcggtatttgaaatgggattgccagataaaatacaagatacctcattaaatttgaatttcagatgaacagcaaatgattttttagtacaagtgtgtctcatgcaatagttggaacacacttaaactaagaactactccaattttacaaaacaattcaaatgtaattgagtgtcctgcatgtttatttttactgccagatctggcaatcctaatttggaaggtattgtagaactggcttaaatgtttctaagccgttcataaatactcaggcgacacatttgcttggtgtgatgcttcctgtggtcttgagctgtttgtgaatgtccccttctttattatcagggcctaggaaaggtaggctcagaggaaagtagtgggcaactgttaaattgttaaattgtgctgagtttcttagacagagacatgaaggcactaagctctagtctagttttatgtctcaccaagccaaatcttgggactcccaatgtcttggacctagaaaactctactaactcagaattgaaagcctatgttcctggctttttggaagaaggaataactgaagtggcaatgggcttattagacattcagggtagttttttcagtttgcaaagcactcccacctacgctgtctcattggatttcaatgagagaggcagggcagataagaaaactagtgctcagagcgggggagtgactgccccaagatcacacagaatgtacatgtgggtctgggtctaaatacttgctgtgatgagtcccagacaagggcactttccaccacatcatgcttctgtctttgtagaaagaccaggaccagagcctgctctgtggccagattctcgagagaatctcatctcaggcttatgctactagggagcctaacaggtcaggtcttgggtaagctgatgagggagattggaggtggcacaaaaacaattaatgctctcaggcttatacctcagcctctaccttgtcatcaaagaaccaaaagagactttcctttctatacactttcctgggctgactttttgtttttataactgttttgggatgggttgaccttgacttatattttaagctgcttttatctggatggtgataggtattgtagggtgtgtgtgtgtgtgtctgtgtgtgtgtgtgtgtgtgtgtgtgtgtgtaggtgagtgctcttaacctgacagtgcatcagaattcttctggatatcttatagaaaagactgcctagatcctataacctgagattctgattcaatagatctgagatggagactacgtgtctgtgtattttacatttctactaggaaatttagcaaaaagtggatataatatacatgcatagattagagattacagcaaaaccaacaacacttgcattctcaccaccaaaaagccgaagaatctgaacattatcagtctttttggagtttcctgtatcccacctagatcacaaacttttccccaccctccaaggtaaccactctcctatattttgtgtgaatcacttatttgctcttcttcatggctataccacctatgtatacagctccaaacaacatattgactaggtttgcatgttttcacccttgtatataaatgggattaaattgtttttgatctgttcactttgatacatgtggctgtgattcatttgcttttggtactatattaatcctttgcataaaaatatcacaattgatctcttctaccgtcattgaacatttgaattatttccaggttcttgctattgccatcaacacaattgtaaacatttttgtacatctctcttggtgcacatgttcaagaatttctctagaacagggatccctaacacccaggctgaagactggtacctgtccatggcctgttaggatgggatgcatagctggaggtgagtagcaagcaagccagcattactgcctgagctccgcctcctgtcagatcagctgccgcattagattcttataggaacatgaatcctattgtgattataaaaacgtgaatcgtattgtgcactgtgcacacacacagactgtgcatgcaagggttctaggttgagtacttcttatgagaatctaatgcctgatgatctgaggtggaacagtttcatcccaaaaccatccgtggaaaaattgtcttccaagaaactagtccttgatgccaaaaaggttggggaccattgctctagagcatgtaactaagagtggaattgctgggtgagagggtcagaacatcttccatttcattgggtaatgccaatctattttccaaagtggttacaccaatttgtactccctctagtaatatattggtattcctccccatggctttacatcctcatcagtattgctattgtcaggctgtatttttttgtctgtctggtgaattaaatacagcatcccattgcagcttcaattttcatagaaatctgttttatttcatttttcataagtttcttggatgattctgaggcatagctgggcttgtaatactgttgacttactcccattcagacttactcccattcagccacccctaggactatctccagattccaacacttgacctctagaaacattttttttggtcgttacaggttttttaaaaatttatattccaggagtggaactgtgattacagttcagtgagatcaagagacagggacaagtggaaattgtgttctttgtaaattccacagatgttactgagtcacacatgataactttgaaagtttgtgctttaaagaaatgtttttaaacagtgccaataaattgtacatttcacttggtgacctgtttctcctcctccacctgtgatcgctgacatgcgcacaatacactgagtgctatgacaaaacaaaaaagaagggggggagaggagggaaggaagaaaataaataaatttttacttctcagcattctttagcatggaaacatatcaatgcctttagtttttatgaagctggatcccaagggtcagtgcacacactgaatgtgaaactttcccattagatgaatcaggattggaatatctgttttttttaaagtaaatgttgtcaacttccattgctctgaaaagtcatcactgttagcatcaggtagtagttagcaatactaaggatggtggtgtgaacaaccatagcaaaagctgctgtggatacaccagtctcctttaccaagctctttcatgaatggacacatccaaacataacttaagagaggctcaccactgtcagaaacttctgctaatttgtctggggtctaatggagtggtctgtactcacacagcatggatcagtcacggaaatgaggaggtcagcctcccagccctcccagaaaatccactgcttcagtaatggcactgagaggtgtttggagctttcaggagtgcgtctctcatcacttttgtagtcagttatttataacactacctttccctgaagtagcgttgttcctcatgaagcagcctattgtaataaactcccttgaccttcagggaaagaagtgaaggttcaggaagagaaaacaacctgtccattctgcacaatggccaagcagtgtcctatattccaatcctaatcccagagctttagagtctcagtttcttggtcattttggcagaaagggtgctggtggtgaagatgagaagtggggatgggttgcctttagtattatgtagtcactagtttgttttctaactcaatattcatgggtcagatagtatttagatgctattgcaatatttcttgtcagttatagaaggaccagaaaaaggcagcaagatgataccaatcaaagataatgaactataagtgtataaatcctgaatggttttaatttatggcctctgtagctgagaataataaggaagatacaattcagagcagcaagataataaaaagtgatcattttgatggaacataatattataaattactaaaatcttgaagaaccatcagatggaggcattctgtgactttttaagaagtgccaggggccatgttgatgtctaactgcttccggtgttttggaatatagtcaaaggtatttttcttctccagtaaggcaagattttactctgtagcatgaatcctggcttaaaaatggaaaacacactctcagcccatctgcagagccctctccccagggcctcactcatgggcacacgcagaaaagatggaagcagactccacagtgaggaggctcctattcttcctggaacagctcaactctctccccgtcctctgactctcaggtttttgctttgttttgttgtgcttttggtggagggtctggatgcagcactgctactgaggttcttctgttcatcaagatggcttcattttcaaaagatggtgaaacaccatcctggagccctggagtggctaaggatgctttcacacatgactagggtattgcaacagcagaatggggtcattcaaatttttgatgcactcctgttgtacccttgtgtattagtttcctgtggctgttttaacaaattcttacaaaccggatggcttaaacaacagaaattcattctctcctcattctagaagccaagagtatgaaatcaagatgtctgcagggttagtacctcccggaggctctgaagagaaatcctttccatgccccactccagcttctggcattgccgggaatccttggcattccttagcttgtagatgtctcactccaaactcttcctctgtcatcacatggcatacctcctgtgtccttgtctgaaatctgtatcttaacgggacatgtgttatcggattgaaggcccaccttaagtccagcatgatctcattctggaatgcttgataacatctgcaaatactctattttcaattaagttcatcttcacaggtacacaggggttaggatttggacatatgccctgggggccactctttagcccactatgccttggtttttctccccctgcgtctgggttggcatgtggatcccatgcatctgtggactgtgaattcttagacccttcaggaagtctgattagacaggttcagaggagaccagattcataccagcatttctcatcctttcttcaatttcttcccctaccccaaaagtttgccatgttcttaaaagggtccctgaacacctctcaagtgaactgtatcccaggagtagcagggacctgagtcaccttttgaactgcaagtgcagactttgcgggaaaattctctcaggatatagcctcctttgcacccacagtcactgcaggctgcaaataagtggctgagctgactctgagtctcacctctgactcttgatcttttgaggtattgataggctatggaatgataaagggctgcccagcatttcctccttcatcagtgaaactcatcattagccacccatttctgagttcaggcttcatttgctgattgatggggacctctgacacctacatgtgtatgggtttgccactgtttctggagagcaagttccctaggtgaggaagggtaggaggtgtcctcatagatgaggacaggctgtcagtaagatggagacggacgaccttcagagctggagaatcactgatctttctcccaaaagtgctgccattgtccctgctctgcaccactgcagagtgaaatgtgctagtgcaggcttcaagtccggcatttatggcccacagggttcagtggccaccctgaagttcatctcgttaatgggagtcaataattacacacttcagtttgtctgtaggaacaacctttagcaaacctcttattttagaaaaatgttgaagttggggaaacagtcaggagaggtaagaaaactggaatagaagaaaaatgtaattggagtgaccgctgatcacacacacagacacagacacacactcatgggcagaacaatattcctttcttttcacttgtttcaaaccggatgatctaaactgggactacccttgccaggtattcacaggctgcagctccccagagctcccttcctgtgctgctctgttcatggccaagtttctactttaagttaatggtttctaaactttattctgttgtatgccccattggtaaaatatttttgagcatgtactcctaccatgttatattcatcaattatatgcacttttgtgtgcctaactgtataatactatttattagcaaaggttttcttttctcttttagataaaataaatatagccacacatctgtcctctataaatggaatcagacttccttgtttgctaagtcatcttaccctggccccaacgttcctgatgtctctgtcccttttccagtcctttaaggagcatttttggggcagtgttctcctggtccactctcttcccattgcatgggctgtgctggccagggactccttcaccagtaaggcctcacggacagctctagcccctgtgttccctcttaagtttcaaagacctttatcctcttttcttagaatctacatcacttggagaggaaagaaagaacttcttggttgaatgctactgacaacactaactctccaaagtcgagatatatctttatagaaattcttgtttccatttcaactgacatacctaagatgcaggctgcaaccaatatttcctactggcttatctaaaaaactatcttggtgctgtttatgatggtgaaaaactagaaataacttaaatgcctaaaataaggaattagttaaataaaatatagtatacctaaaatattataccacaattacacatatacattgtaaaaatattgaataatatggggaaatatttggaacttattattaggtttcaaaaagcaagttaaagaatgtgtgtagtagaaattgtttgtaaaagaaaaaaagaactatgtacataaggataaagtctgtaaggaaatataccaacacagtagcagaagttatttctaggtaaattaattattagtgattttcatttccttctgttgcttttgctattttccaaatttgagttcattgtcatatattattttttataataagataaaacatgctatcctttttttttaatacaaaggaataaaaaattatcattcgagactattctattgagttatcttagactttgggggaaaaacgttaactattttgtgccacaaccacagtcaaaaaagcctagccaaaaatcctggctaggatgcagtaggcaagcagacagacaagcaggttattttcctgcctgcctgcctagggacagcacattggcagctggcatgggctcccaagtccagagcaccccaccccctacctctttctgcttggcttatccttgaagggtaggaagagggaaatgtggaaaataagtgtgcagcaggctcaggaatatacccaggggccaatcccagcatctaagtaagagtacagaaacacacccacttcagttcaatttttgcccctgcagacttaccaagagggctctgggtgcttatgcttttcatttgagcatgatttctcatcatactaaggtcactgggtggatgtgtggccttctatctctgcccgtcttttggaattcaccaggaaagcccacattagttctctggttctgtttgtagaaacacgtcactcgtctctcaagcaatacagtccctggcccttagatctggacccttgagcaatcacatcaacaagttgtgatgtgtgattctttccatctaatgtgattctgatacaactagcagctggagcttggactcctgagaagggttgccttaatgagtggcatgcttgcctcaggggtggaccttccagggaagtattgttcacctccccatcaggacaggcctttcctggggtgttgggatggattatagatgtccagtgaacaaggaacccctcctaactgaacctcatgggtctgcccacagggagatagggagataggcatgtggagcaaggaaagaaggactggctgggggagcagaggcctggctctggtcccagctctgccattaggagcatcactttacctctctgggtcttgagttcctcatctgttaggtaagatcttagactagatggtcaataaggccatttcctgctctaaggcaaggcttaggcatatccaatacaaatgatggccaaatacctggcataaaacctgtgaggcacagaaatctctaccagcccagggagagagacccacctcctaaggtttggccatggtttctggaatctaaacagcccagtgattcaggtcacactttgtaccacagagccaagataggatcattgcctccagaaaccctagtgttttctctggaggaaggaaagaggaactcctggcccatcacagcagctgaacttgtcagattagattctagaggttcaggagcctgaggagggatcacagcatagagataaaaactagtattggcaaattaatgcttcctccagcccccaacaagatgccccgatccctagaacctgtgaagatattactttatagggcaaaagggactttgcagatgagattgtcttggatgatctgggttgacccagtggaatcacaggggaccttaaaagggaaggagggaggcaggagagtcagtgtcagagaaggaatgtgaagaaggaagcacaggtcagagagagatggagatttaaggaggtcacattgctggatttgaagatggaggaagaagccgtgagaggaagaatggaggtagcctctaagggctgggaaagaagaggacaaggattctacccagaagctcattcagaaggaacgcagttccaccaacccattttagacttcttacctgcagaaccaaaagataatatagttgtgtcattttcagccccccactttctggtaatttgttactgcagcaataggatactaacacagctggccttgaccaagtcggcaggaaaattgacatgctcttggggccagggccagggccagggcttacctggggcacgattctagaaggaacaaggctcagaggactgatggggacttcaagacaaactgacttacatatattgaaggtatccaatgaattctggctggaaatgcagtccttaaactgtctcctccactataaacagaataaacttctctatggacaagaaatgggaaagaaatacccaaggggacaaggagctgaggccagaaataaggagatgcatctgggagtttggctcttgtaaggcaagaagtaccgaaagcacctccagggagggtcctggagaaggcacattgctagaaatggggcacctgggataaggctactactttacctgtagagagagcctgaaggtgctgtaacagctgccaagggctcggtttctatgaagctcctgtctagggtggttggaggaggcagtgaaactacacacacaggggctggggtgagctgccaactggctcataaatgagccccgtttcctgtcccaaatgaaactggcaagagttgcagactgtaaagtgcttctccagccacagtcacaattgattcctataatatagcaagataggtatttctaagttgtagatgataatcgaagatgaactagtaagtttcaaagagaggaagctgagtctttctcattcattgcagtgttccaagagcctagcctaagcctccatataaaataggcattcattaaatatttcttgacctatagttagaagctcggagaaatgaagtaagaggttcaaatctccaaagccagtatattgcagtcagatattcaattccagtttttgaacacccagtcttatgttcttaccattatgacaagctcttcttaaagcacagtgcttcccaggcctgtgcctacagaagactcaccctcattagatatctggcagtacattcagaagtttggggcatctcccagataccagtgatactggggtgtccgctttgtcctatgacacaaccaaattacatcaattggggtgtctggaagtgccgtgtcttcagaggggtcttgggaagcccactgtcacctgtgtcttctttgcagatggccaggttgaggagtgctgtccaaggcagccacagcctaaaacttaccagccatcccggccacacagagatgcaatccatgtgaggaagtggaatcgattactgccaccagctaagctgtttatagtttccctgcccttttagaaatggaaggagccctgtgctgagagttgagtgctgggttggcgttggctgacacgtgacatcagacctcagtctctaaattggtgaattgagtgggtgggactagatcatctataaaagtatgtggagctgtctttttgctttccttacttcctcgtattaagaagcttttattaatgttatctgagttttttagcctcactgatttctatatatcaaataatacagataagacacatcctaaagaaaaatgggctctgcttaagaaaagtcatgaaccactctgaatttatgcttgaagggatttgaaagaaagccgggaccttgcaagaaagaataaaataaaattcttttgaatggggataactacagaattattctacttagagtggaaagataatctttactcattcaagatagagaaagactggttcaacgtaagttgaagagggatctgggggtcattttacctctgtggctccctttcctgacttgttataaaaatcaatcaaaataatgcacaagagaccattctgtaaacaggaaaatggcatagtggagtaacacacagccctgcctgacagcagtcaaccagccacagcagcctgaagcaagtggtgctgctctgtcttgatttaaggatcttgatcctacaaagcaggcttactgggcccaggcattcacatataacatcatatctgggaatggggggtgggttaaactcaaaaattttggacatgacaaaggatttgctgagaatgaggagccctcacctgaggcagtaatcatgcacatttacaaatggaagtgcagcaagcttgaaagaatacacagggcttcagatctcactgtccagctctttctactaagtgattggtgaggacctttaacctgcatagcaaaggttgtggtcaggttattcttatctaatgcattatggtccactttgaattttctacatcttgctttgggatccttactggtgattcgtagtcattttttttgtttttgtttttgttttttgtttttctttctttcttgagacagagtcttactctgttgcccaggctggagtgcagtgacaccatctcagctcactgtaacctctgcctcctgggttcaagcgattctcctgcctcagcttcccaagtagctgggactacaggtgtgcgccaccacacccagctaatttttgtatttttattagagacggggtttcatgatgttgaccaggttggtctcgaactcctgacctcaagtgatcctcctgcctcggtcacccaaagtgctgagattacaggtgtgagccaccatgcccagccttcatgcttgatcaaagtacctgtgttgagtattactcgtaagtacatatgttgagtattactcctttcctagttgattcttatggaagctgttagtatttggaaatatgcgagatgctgtgtttacttgttaatgaatctgatagcatgcatagtgtggcagctccctgtgtctcttttctggagcaccatgacttgtatttgtgttatatttggcaacctccttctttctgttgtgatcagcatttgttgcatctagaggcaatgaaggaggtatttgaaatattttgctaagaatggtgaattattcttaggcaaggtgcctacaatgagaatagtctttcggttatatattgccatgacactaaagtagatagacattaaatttacttctgcaacaacagcttgggatgcccctgtttaatccccttatatccaatattgcttcagctaagcaaacataaagtattattaaagtatcattatgtagattaaataatcttcctctcctaagaattatttttcttcatttattaagacaacacattgatacccaaaaggaattcattctatagtggtatgtacccaggcagtgcagtgtgggagaactcagtgcagtcactgctatctctcccatgtccaagctctaaacacagattatatcctatttggagcctttaactgtaaaataggtcagagcactgggaatataaaaaaaagagtcatcaaaataattaatgctttcaaaatgaggatttgagagaagacaggagtctcagtgcttttggctaggcagttctctagagagcatccataattgcccagccctcaaatgagtgcttcattcatttctctcatttttgctgtctgttacttttccatctctcttctatcccagtgttctctcttcctcttccctcctcaatctctttgccatcaaaagcctaaagtattcttcccatcaacaactctggaaacagaataggcagaaccagcaagattggctgacatacagactaaatgggctggccctactaataaaaacaaattcagacacctgttggtcttttgtgtgacacatatataaggacaaatttaggaaacattgcttgctagagaaacaagcttagttgcctaaattgataagagaggtgaattccagaagcctgtgggaatgaggaaataattaaatagagtaatatttttaaagtaagctggatcaactgggttctgtgctcctgagatcaaagacaggatgaaaactcagtgtccttcagaaggaaatcacatgtctagatggagtgaaataaagatgaggttgagggggggaagggggtaatgtacatgcccaggggggttgtaggtgaaagtgataatctcagagggaagtgggatggggctgggatagggaaagaactactctgctagcctgaggctccatttatggctgcatatattcccaatggagataggacagagtctgaggtagccacagccttttagccaatcctacggttgtgtatatgcagagcagacactcaagaactaaatggcctgaacattaaagtgcattcctcctccagatttttaagacctgacatacgcaaagcaagaaaagaaacacattatcttacctatacacagatctattgacagatgacagaagtcttactgacttaaggaatataagcccatcatctgtaaaaacatttgccaatcactaaggaacataggaagtacccatagaaatccaggcttaaaaatcaaaacagctgggtatggtggcatatgcctgtagtcccagctactccagtggctgaggcagaaagaatgcttaaaccccggagttctgagctgtagtgtgctatgctgataagtgtctgcactaagtttggcatcaatatggtgacctcacaggagcaggggactaccaggttgcctaaaaaaggatgaactggacatgtcgtaaacaaagcaggtcaaaactactttgctgatcagtagtgggatcatgcctatgaatagccacagcactccagcctgggcaacatagcaagaccccatctcttttttattaaaacgtaaaaataaaaataagcacctgaaaaacaatcaatagagacatcagcctacacacactgcagggaagacagacttcacagatagaacccagccaagttactaaatgaagaaacaaaactaacaaagatagcaaaataaaacaactataagaacaagaaaagaacctatggcagtcttcagagggaaatatcagaatccagaattgctgtaatacattttctaaaatgttcagttttaacaaaaatgagaatatatacaaagaaataatacaatgtgactcataagaaaacaaaaagctaataaaactttctgaatgtcctcaactattggatttagaaaataaaaccttaaaagtagctattatgaatatattcaattaaaaacaacaaaaaagtttaaagaaataaagaacagcatgacaacaatgagcaataataactgaaaaactgagaatttgactggacagaaaaatcttttaaaaagaaaccaaaatggaaaatcttgggttggaaagtgcagtaactaaaatgaagaattcactagaccagctcaacagcagatttaagaaggcagaagaaattttaaaatgtgaagacaagccagtataaatttttcaccctaaagaacagagagaaaaatgttttaagaaaaatgttcagatcctaagaaacttctgggacaacatgaagtgttataatatgtgtttaatagaagtcctataagagagaaaagaaaaggggggcaaaatttttttgaagaaataatggcctaaaacttgccaaatttggtgaaaaaaatcaatttgcacatccaagtgcctcagaaaatcccacctagaataaatacaatgagatctacatctagacatatcatcatcatattgttaaatgccaccaaagatcttaaacaacaagagaacaatagcttatcatgtacagggaatattgaaatgattaatggctgacttcttatttgaaacatgaaagactaaaagacagtggaacacatattccaacatgttgaaagataagaaaaaatgtcaacaagtttttgatatcaagcaaaactaacctttaaaaataaagacaaaacaaataattcccagaaaaacaaagacagagaatttgttgccagcagacctgttttacaataaatactaaggaagtgtttcaggctgaaatgaatcataccaggagctaacttgaatccacggggagaaatgaagagtactagaaatagtaaacatatgggttaatataaaaggcttaaacaacctttttcttattcttctcttaacatcttaaaagacaaaattatgtaaatccacaattataaaactatattgttgggttgataacatatatagatgtatataggacaataacagcacaaaaatggagagtagaattagattggagcaaaatttctatattttagtaaaattaggtaatattaatcttaaatagactgtgataaactaagatgcatgttgtaatttttagagcaatcactaggaaaataactccaaaatgtaagagaaagaaacagagagaaaagaaagaaagaaaaagcaaggaagaaacaaaggaaaaaatgaaagaaaataaataaacgattaaaatggtacgctgaaaagtattcagtgctgaaaaaaaaggaagaaagatacagaggaactaaaaaacacacaagatcagagattgtcagactacataaaaaggaagatgaaatgtatgttttctagaagagggacactttagactcaaatactcaaatagattgaaagtaaaaggattggaaaagagatatcacacaaacaattaaccaaaagaaagctggagtggttgtattaatatcagataaaattaagacaaaaatatactaaacagtatattttataatgataaaaatgtcaattcaccaggaagagataacaattataaatgtatgtgcatcaaacaacagggccacaaaacacatgaagcaaaactgttagaactgaaaggggaaacaagacaattcaacaattatagtgggagatttcaataactcccaaaagtagaacaactggataaagaaggatatagaagccttgagcaataacatcaactaactcaacctaactgacaaataaacacctttccacctaacgactacataatacaaacctttcaagtaaacagagaacattcttcaatatagaccatatgccaggccataaagaaagtcattaatttatataaaattatacaagtataaaattatacaagtaaaaaatcagtattatataagtaaaattaaaattaaatttaaatttaattaaaattaaaattatgcaagtaaaatttaaaaagtatatccttcaatcacaataaaacaaactaaaagttgaccactgaaagaaatctcagaaatccctgactattaggaaattaaataatgaacttctaaataaacatcaaagaaaaaatcaattgcatgggaaatagaaaatatttcacctgaatgaaaattaaaataaaacatattaaaacttatgagatgaaatttaaaagtgctcagagaaaaaaaagtatagctttgaatgcctatattagaaaaagagtaaagtctcaaatctataacctaagtttttattttaagaaattagaaaaatcaatgaaaacatgcgatgtaaaagcatgcagaagaaaggaaataaagattgagtagaaatccatgaaataaaaaagcagtagtaagaatcattgaacccaaaaatttgttatttgaaaagaataacaaaattgataaaccttttattcagattaatcaagtaaaagagagagaagacacaaattactaattcaggaataaatgagggaccatcactcttgaccctaaagaatttaaaagattgtaagggaaactaaacatccttttgccaatatatgacaccttagatatgacaatatatgacaacttagataaaagggacagatttctagagacacacaaattaccaaaaccaattcaggaagaaatattaaaatctgaatagacttataacaagtaaagacttgaattagtaattgaaaatctaccccaaaagaaaagtccagacccaggtgccttcattggggaattctaccaaatacttgcagaataaattatgccaattattgacatattcttttagaaataaaggaatgaatacttcccaactcattctatgaggccactcactattcccctgatcctaaatctaggaaaatagatgtgacaaggaaagaaaacccctgatcgatatccctcataaaagatgggtgcaaaaattcttaacaaaatattacaaaccatatttagcaacggatgaaaaggatgatacactataaccaagtggaatttatttaggattgcaaggttggtttaatatcccaaaatcagttgatgtaatataccatgttaataggataaagtacataagccgtttggctatctcaataaacacagaaaaggcagttgatagaatccaacatccactcatgatcaaatttctctatgtactaggaatagaaggtaatttccttaacctaataaagagcacctgtgaaatacccatacctaacaaacaacataataatgaaagactaaaagcttgtctccaagattaagaataagggaaaaatacttgctttcatcacttgtagtgattgagcctagccaatacaaaggaagggaagggaaggggaggggatgggaggggaggggaggggaggggaggggaggggaggggagaaggaaggaagaagggagggaaggaggaaggaaggagggaaggagggagagaaccaaaaacatgcagatatacagattggaaaggataaaatagggagggagggaactaaaaacatacagatatacagattggaaaggataaaataaaattgcctttattagcagataagatgaattttaggtagaaaatcccaaaagaattcacaaaaaatgaaagctaatttaacaaacaaatgaatttaccaaggccacagatacaaaatcaatattaaaaaactaactgtatttctatgttctaacaacaatttccaaaagggaattaagaaagtaattccactgacaagatcatcaaaaagagaaaataattagaaaaaaatttaacaaaacaagtgcaagctgcatacattaaaaattgcatattgctgaaattaaagataatataaattaaaaaaagagacattacattttggaattgaaaatatcaatagcttcaagatggtatttctccccacattgatcaataagcttaatgtaattgctatcaaaattccagtaggcttttttatttcgtaacttaaaatttatatggaaaagacctggaatagacacaatattttttcaaggaacaaatttggagaacttctactacctgatttcaaaacttactataaagccaaagtaatgaagacagtgtgatattaaagaaaggagaggcttatataccaatggaacagaaatgagagtccataaatacatgtttaatttataatcaactgacttttgacaaaggtgcctgaggtaaaagaaatggtgctggaataattggatattcatttacaaaaaaatgaacttagaatatgacctcataccatacacaaaaattaactcagaatttaagagccaaaagtatacagtttctacccaagaaaatgaaaatgacagaacatctttgtgaccttgggtggggaaaaacgtttttaggtatgatgctaaaatcacaatcaatgcaagacattgataaattgtgcttcatcaaaatttaaaacttttgtgttctaaaagacaccattaggaaaatgaaaaatcaagccacaagactgggagaaaaatttgtgaatcatacattgcataaaaaagtgtatccataatatataaacaactcttacaaatcaataataagactaaaagctgaattaaaaaataagattcaggccaggtgccatcacccacacctgtaatcccaacactttgggaggccaatgcaggaggattgcttcatgccagaagttcaagaccagtctggtcaatatagaggggtgccatctctacaacaaaatttttaaaaaataagatttataaaacttacctcaaggggatttaataagaattaaacaaaataatacactaaagctcacattgcacatacactaaagcaaacattggcacaatgtttgctacacaggaaataatcaatgaacagcagcaagaggtatactcagaaaggtatactcattattttgtaaataaacaaactgagctgcaaagaaggtaaagaattgtccgaagacatacagcatgtaagcagcaggcatggatccagctgtaactttcagtatctaagaaaaaaaaattcacaggtgattttcacactggatgagggaaagatgttcccctgggccatcctatccttcaaggtactgagggttcggacctccccctggtctctgtcccatcaggttttgctggtagggaaggttgggggcaaaggaaaaggaagacgcaggctgcctttaaggggaaactctcaggatctcacagttgtcactctttccttcacttgattttcaataactgtttaaatattattatagttcattgtcagaattatgtggaatagagaaaaaaatagaatctgctttaaatgtgcatcaacagtgaactggccaaattaattaggatggatccataaaaaatttaattacaaaagcaatgtatatttttaaaaatgttaaataaatattatatacactaacatggaaaaatattgatatagtttaatgaaaatgtaggttgttaaacagtatgcatattatagcctcattttggtttgtatatgtaatttaggcatagaaaatgtcctggaagcactagcaagactaataaagaaaaaaagagagaagaatcaaatagacgcaataaaaaatgataaaggggatatcaccaccgatcccacagaaatacaaactaccatcagagaatactacaaacacctctatgcaaataaactagaaaatctagaagaaatggataaattcctcgacacatacactctcccaagactaaaccaggaagaagttgaatcctgaatagacaaataacaggatctgaaattgtggcaataatcaatagcttaccaactaaaaagagtccaggaccagatggattcacagccgaattctaccagaggtacaaggaggaactggtaccattccttatgaaactattccaatcaatagaaaaagagggaatcctccctaactcattttatgaggccagcatcattctgataccaaagcctggcagagacacaaccaagaaagagaattttagaccaatatccttgatgaacattgatgcaaaaatcctcaataaaatactggcaaaacgaatccagcagcacatcaaaaagcttatccaccatgatcaaatggtcttcatccctgggatgcaaggctggttcaatatacgcaaatcaataaatgtaatccagcatataaacagagccaaagacaaaaaccacatgattatctcaatagatgcagaaaaggcctttgacaaaattcaacaacccttcatgctaaaaactcccaataaattaggtattgatgggacgtatttcaaaataataagagctatctatgacaaacccacagccaatatcacactgaatgggcaaaaactggaagcattccctttgaaaactggcacaagacagggatgccctctctcacctctcctattcaacatagtgttggaagttctggccagggcaattaggcaggtgaaggaaataaagggtattcaattaggaaaagaggaagtcaaattgtccctgtttgcagacgacatgattgtatatctagaaaaccccattgtctcagcccaaaatctccttaagctgataagcaacttcagcaaagtctcaggatacaaaatcaatgtacaaaaatcacaagcattcttatacaccagcaacagacagagagccaaatcatgagtgaactcccattcacaattgcttcaaagagaataaaatacctaggaatccaacttacaagggatgtgaaggaactcttcaaggagaactacaaaccactgctcaaggaaataaaagaggatacaaacaaatggaagaacattccatgctcttgggtaggaagaatcaatatcatgaaaatggccatactgcccaaggtaatttacagattcaatgccatccccatcaagctaccaatgcctttcttcacagaattggaaaaaactactttaaagttcatatggaaccaaaaaagagcccgcatttccaagtcaatcctaagccaaaagaacaaagctggaggcatcacactacctgacttcaaactatactacaaggctacagtaaccaaaacagcatggtactggtaccaaaacagaaatatagatcaatggaacagaacagagccctcagaaataacgccgcatatctacaactatctgatctttgacaaacctgagaaaaacaagcaatggggaaaggattcccaatttaataaatggtgctgggaaaactggctagccatatgtagaaagctgaaactggatcccttccttacaccttatacaaaaatcaattcaagatggattaaagacttaaacgttagacctaaaaccataaaaaccctagaagaaaacctaggcaataccattcaggacataggcatgggcaaggacttcatgtctaaaacaccaaaagcaatggcaacaaaagacaaaattgacaaatgggatctaattaaactaaagagcttctgtacagcgaaagaaactaccatcagagtgaacaggcaacctacaaaatgggagaaaatttttgcaacctactcatctgacaaagggctaatatccagaatctacaatgaactcaaacaaatttacaagaaaaaaacaaacaaccccatcaaaaagtgggcaaaggacatgaacagacacttctcaaaagaagacatttatgcagccaaaaaacacatgaaaaaatgctcatcatcactggccatcagagaaatgcaaatcaaaaccacaatgagataccatctcacaccagttagaatggcaatcattaaaaagtcaggaaacaacaggtgctggagaggatgtggagaaataggaacacttttacactgttggtgggactgtaaactagttcaacccttgtggaagtcagtgtggcgattcctcagggatctagaagtagaaataccatttgaccgagccatcccattactgggtatatacccaaaggactataaatcatgctgctatgaagacacatgcacacgtatgtttattgtggcactattcacaatagcaaagacttggaaccaagccaaatgtccaacaatgatagactggattaagaaaatgtggcacatatacaccatggaatactatgcagccataaaaaatgatgagttcatgtcctttgtagggacatggatgaaattggaaatcatcattctcagtaaactatcgcaagaacaaaaaaccaaacaccgcatattctcactcataggtgggaattgaacaatgagatcacatggacacaggaaggggagcatcacactctggggactgttgtggggtggggggaagggggagggatagcattgggagatatacctaatgctagatgacgagttagtgggtgcagtgcaccagcgtggcacatgtatacatatgtaactaacctgcacaatgtgcacatgtaccctaaaacttaaagtataataataaaagaaaaaaaaaaagcagaagccactgtatatttcctgcagaaggtatgcagggaaacagaaaatgtatgaaaaaacctccctaaataaaagacatctgagactctaattcaaatgaaaaaaaaaaaaagaaaatgtcctggaagcatgtataccaaactattattgccaattacttttggagagtagaattttggttggggaactaggaggagaatacatttttgtatcattagaatttttacatatttattttgtaattaaaaactaaaaatttctttaaatatttatatctaaaaatgctatttgctttctattaagaaaaggagacttccagttttaaaatggtggtgtagaagcaagctggttttactccccacaccctgtagaaaatcaaaaccaaagcactgagattttcactagcaacacttgaaattcaaacatgaggatcagacaggtcccaggaccacagagaagtgaaaatattctaagcaagtagtaggagaatcagactttcacatctgtgacacccctaccccacaattttcctggcaacaagttcatagaaaatctttcctcattcacaatttctacactggaaaaactgaaattgaggtggtcaaccagcttctccaccttcttagggtctctttggcaggagatctgtccttcccttaatgcacaggaagcattgtgattgtctaaagggaaaaatatccctaaggatgggcataggcaaaggtaggactgccgtctccagccatggaaactctactctgtaactcagccaaaggagatgccaaatcaatgtggctgttcagcagcatcatgcttaggaggcacatttcacaggttccctgggcacaaactgctagccagccttcccacactactgggtaatctctttgagacctcccccatttggaacaggcagcactttgactatttattagcgcagaggtgaacctgggcttcacgtgctacttagaaccaaaaaggaggcagcaacctataggtaaaaatttgctaagcaaatatatccaataaaaaacaaaacaggccagagagagaaaactagaataaaaaactgatctttcaatgcaaagatataaacacataccaacacaaaacaacagctaacagggaaccatgacctaccaaaaggacaaagcaacaatacagtgactgaccctaacaaagtggccatttgtgagctccctgaccaataattaaaaatagcattttaaaggaaacttagtgatctccaagataacacagaaaagcaaatcaaaagtttatcagagaaatttaacaaaaagattgaaatagtttttaaaaataaaacggaaaccttagaactgagaaatacatttgctgaagtgaagaactcattagagactctcaacagaaaaatcggccaagcagaggaaaaatcagtgagctcaaacactggctatatgaaaatacacagtcaaagaaaaaagaacaaaaaggaatgaagattgcctgtaagatatagaaaattatctccaaagaccaaatctaagaattattggtgttcaagaaggagccaaggaagagcaaggggcataaagtttattcgaagaaataatagcagaaaacttcctcaaacttgggaaatatacaaatccaaggtctatgaacaccagaatcaacccaaataagaccacaccaaggtatataataaccaaactctcaaagttcagaaacaaagagaggatgctgcagtcatcaagaaaaaaaactgaaataacatataaaggaactccaattcatctggtaacagacttctcaacagacttctaagtaggccaggaaggaatggaatgacattttcaaagtgcccaaaggaaaaaaattctgccttccaagaatactgtgctcagcaaaattattcttcaactatgaaggaaagctagtccttcccagacaaataaaagctgagaaacttcatgaccaccatactcttcttaaaagaaatgctaaaggtagttcttcaatctgaaacaaaaataaacactaacatgcaaaagaaaaacatttcaaagtgaaaaacccactggtaaaattaagtacacaaataaacccataatactgtattgtaattatggcgtgcaattcacttataactctaatatgaggcccaaaagacaaatctgtcaaaaacaataatagctacagcaacctgttgagagataggtaatataaaaatttgtaaattgagacaactaaaattcaacatgtgggggatatggagttaaagtatagaattttttttttagtttttttttgcctttgtttttattcttctatttgtgatctaagataagttatctctttaaaacaacttattattatctataagatgtttttgtaagcctatggtaatcacaatgtaaaaacctatagtagaatcactaaaaataaaaagcaacaaattaaaacacactaccagagaaaatcacttaaccacaaagggaaatggtaagaaagggaggatcttaaaacagccagaaagcagagaataaaatggcagtactgagttcttattatcaataataacactaaatgtaaattgtctcaattctctaattaaaaggcatagagtggctgaatggataaagaaataaaattcagctatatgctgccttcaagaaccccacttcacatacaaaagacacacatagactgaaagtgaaggggtgaaaaaagatattccatgcaactggaatccaaaaaaggacaggagcagctatatttatatcaggtaaaatagactaaaaatctaagactgtaaaaagagacaaataacttactatataaagtaaaggggtcaaattcaagaagaggatataacaattataaatatctatgtacctaatatcagagctcccaagtatataaagcaaacactaatagatctaaagggagagatagactacagtccaataatagtaagagactttaacaccccacttttagtaatggacagatcatccagacagaaaatcaacagagaaataacagtgttaacttacacactagatctaatgtgcctaactgatatttgcagaacatttcacccatctttgctgatatggtttggctgtgtccccaccaaaatctcatcttgaattgtagctcccataattcccatgtgtcatgggaaggacccagtgggaggtaattgaatcatgggggcaggtctttcctgctgttcttgtgatagtgaataagtcttacatagcgtaaaggggagttcccctgtacacactctctcttgcctgccaccaagtaagatgtgcctttgctcttcctttgccttccaccatgattgtgaggtctccgcagccatgtgaaactgtgagtccattaaacctctttttctttataaattacccagttttgggtatgtctttattagcaccatgagaacagactaatacatgtgcagaataaactaatcaacacgtggaatattctccagaatagatcatatgttaggccacaaaacaaggctgaacaagttcaaagaattcaaaatcatatcaagtatctttgctgcccacaatgggataaaactctaataagaagagtaaccttggaaaatacacagacacagaaattaaacaacatgctcctgaacaaccaatgggtcaatgaagaaaataagaaggaaattttaaattttttgaaacacattaaaatggaaatacaacataccaaaatctatgggatatgacaaaacagtgctaacagggagtttatagcaataaatacctatgttttaaaaaagtaaaaagacctcaagtagactaatgaaccccaaggaaaagcaagaataaatcaaacccccaaactgaaaaaaataataaataccagagcagaaataaatgaaactgagactaaaaaaatacagaagatcagcaaaacaaaaagttatttttaaagataaacaaaattgacatttatctagactaagaaaaaaagaaagaatactcaaataatgaaattagaaatgaagagggggacataacaactgatacctcagaaatacaaagaattattagagactattatgaacaactatatgccagcaaattggcaaatctgaaagaaatggaaacattcttggacacatacaatctaccaagatggaaacatgcagaaataaaaaacttcaataaactaataatgagtaatgagattgaagcaacaacaaaaactctcctttcaaagaaaagcccaggaccagatggtttccctgctgttgtgtaacaaacatttagagaagaattaataccaattttgctcaaactcttcaaaaaaattgaagaggagggaatacttccacatttattctatgaggtcagcattaccctgatagcaaaaccagacaaggacacaagaaaagagaactacaggcaaatatccctgatgaacatagatgtaaaaatcctcaacaaaatataggcaaatctaattcaacaatacattaaaaatattattcaccatgaccaagtgggatttatcccagggatgcaaggatggttcaacatacacaaatcaataacatatcttacacctagaaaaacctgaggactccaccaagaaagcatttgataaaatttaatgtctctttatgacaaaaatcctcatcaaagtggagatagaaggaacatactgcaaaataacaaatgccatatgtgagaaacccacagctaacattgtaccgaataggaaaaaattaaaagcctttcctctaaggaatggaacaaggtaaggatgcccagtttcaccagttttatttaacataacactggaggtcctggccagagtaatttattcagagaaataaataaagggcaccaaaattcaaattagtatagccactatggagaacagtaagaagtttcctcaaaaaactgaaaataaaactactatatgttccagcaattcaactactgggtgtatatccaaaagaaaggaaatgcatatatctaaaagacatctgcactctcctgtttattgcaacactattcacaatagtcaaaatatggactcaacctaagtgcccatcaatggataacgaaaatgtgttacttatacacaatggaatactatttagccataagaaagaataaaatcctgccatttgcagcaacatggatggaactgaagacagttatgttgagtgaaataagccaggcacagaaagacaaatattgcatgttctcatttctatgtgggagcttaaaaagtggatctcatgaagatagagagtagattggtggttaccagaggctgggaaaggtaggagaaggggggtgaaggggaagaatatatacatatatagaaactatattatatatatagttattaccacttaactgtatacttaaaatagtaaagacagtaaattttatgtgtatgttttaccttaattttttttaaaagaataagttacttgcttaaagtcacatggctagttaatggcatgctcaagattggagctcagatctgtgtcttcagcccatcatcctctttcagaatagtcctggatgagaaattaggaagttcttctggatcataaggtcatacatgaataattgattcagttatcaaaagaggtctcagaatctcctgtttgggagacactgagtaatgagtactggtctagaatggtttagaaaggagatgagagccttgaggagatacaagggcattgatcaagtgacttctgggagctcctttcttattctatgactcaacagagtaagaaaataccatttttttgatagtttcaaattaggtagctcattttcaaagcagtggggagaaaaaaaagggaccctagaaacgaccatctagtaattcaatccctgttaatatagtggaacaaatattaagaggaataaaatactatctaggataatggaattatgagcaataagcattataggttttaaaagaacaaatcatgccagacaaagttgattgcttttttgatgagtagactaacggaatagagtagatgtaatacatcttgatttcagcaaaagattttatagtgtctcatgaaattttactcaggaaattaattgaaaatggcctagagatgagcactgttgcgtgaacttcggcatggtggcaggacagcagaagggaatgagaaacacccatgcatgagagtagggagacatggggcagggaatttcaggtcaagggttagttctatttaattatttcattacttctcaggaacaagaggaggttgatcttacgtaagtgaaattcatggtatatcttatctgtgtgctttaatgaaaaaaaaaatcatttgaaagctagcaagtctacgtaggttccaatcccaggcttaaactcattctgggtcccaggggaagccctgttgaagcaaacaatatcaagtaggccaatacttaatttcaactctaattctgaatgatgaagtgggtgtaatgttcttagccaagagctctgcctattcttgtgaccatgcccttgtcactgtgtcctatcctgcataggccccctttcaacctcaacacctgggagcccaccaagaactcacagcctggtacttaatgctataataagttatttagtacctgctatgttccaggccatggtaggcataaaggataaaggatgccataaatacataagacgtaaggatagttcatggtttggagtaggtgacagacacattaaacttgctgtgattattgctgtaatcaagtttaaacaatattttatgaaaaaaatacagtaggctcagagtaacatcagatagggaaaagcgggaggttaggagggtcaggggttgtggaagccagcctcaaagaggagcagaggccaggcatggtggttcacgcctgtattcccaacactttgggaggctgaggtgggtggattgcttgagtccaggagtttgagatcaacctggtcaacacggaaaaaccctgtctttacaaaaaatacaagaattatccaagcataatgtcacagctacttggggggtggaggcaggaggatcacttgagcccaggaggtcaaggctgcagtgagctataatggtgccactgcactccagtctgggtggcacagtgagagcaggtctcaaaaaaaaaaaaaaagaaaaaaagaaaaaaaaggatgtattttaccaggttctcaatggaaggctagatttttatataggatgggaaatgaaagggcaatgtagccagaggatagactggtgggcagccttggacaagttctgaacctccgtaagtgatatggaagactattatagtaatcatgtcagccctaagttgtgaggacgaagtgaaaggttgtctatatagaacatagcaccatgctgagcacagagtaaaggttcagtagttggaagccattatgctgtcactcctgatagtaggacctgggacaaggtggggtggagctgggttgcagcatgaggatggaaagataggtttagaaccagcttgtgaagaggactgtaaaagtcatattaagaaacccagactttattgggcagacaatagaaggacataaatatgggggtaacttgaccagcccttcttttgccaagattgctctgatagtgatggaagaagagtatgaggaaagggtagccacaagaagaccaggtaaggggctactcaagtgacagataaagacccaaacctactcccaaatggaagtgggagtacaaaaaggctgtgagtctgaggtctgttttggtaactaaagaaaagagaaccagtattaatttaattgtatagtttggacaactgggtatttagtaacgtcattatttttaaaacagagctcagaaacaacaaatttcaagtttggtttttcataatcccatgaaaaatttcttaagcagacttatgcaaatcaaccctctgaaccatggttggaatgccattttcatcattgccacttttgttgtagatgtgagattttagtgggctaagatcatctctcctggctctcagagacattggcaattggagcagagctgtttgtaggagaaatgtttcagaaggttttacctgggaagaactgggaaagctgtactaatcagaaagaggtaaatgaggaacccagaaaccaagggggttcctagaggtagtactttcctctctttttgccctctccttgtgttgtttcaacataacaaggaaaggtttttctaagtccccttcagggtggtttcatcatggagcaaaatgtttctttgttttgttacttgacatatagacaaacactagagagaagcattatacatatactgaccttaaacataataggttacagactagacctattagttataattttcctgcattgttacatggaacaaaatttaaactttcacaactactgatacccacagttagattttgtcctatctttttttttaaacattgaacaaaggagaatgaaaactagttgaaaatattgcctgattcattgtctgttatgagaagatattcaaatatgtcttagacacacaatacaactgtgagtcatccaaaatacagtctggttctcttgaaattatccccatgagattaaactctatagagggaaattgcttaaggatctcactgatgccatcactggttgtactctttcttgggtaaaagttggtgaaagaatccgggagagagagaaggaggacgatgggaaggaggaagggagggagagaaatcattctggaccaagaattttctttcaatcttttcctgtaaagctttgactgattacgtttactttgactcacctgaagtgattaataagagtgtgtctccataaaagaattttgggtctgtgtaatgaagacatttttacttaaacttttttcagtgtccctaagacataattactaggtcattttgaaatcatgttttatggttgctcaggaagatgaatatgaggagttccaatggggaaattaggcccgtggtttagtctgctctgatttatgaattgccctttaaggaaatacagtggtagttgaatataggcttatgggaagaccgtgttgtttaggaagtgtgttcagtggaaggagtattagcctaatagtcaaactgagctatgagtcaatttgtgactcagtctgatttattgtcaatcatcaaacagctcttgagtccctactatctactggacattcttctaggcctggagagcaatacatagcagtaaaagatatggtacttattctaaggagctcatatttttatcaaaaagataaggcacaaacatgtagcaagggttaaacatgatattataaaagcaggcacacaaatttctcttgggaggaagctgtctttatttggaaaaatgccttcacgtgtaggtcacagatgtccatatttacgcaaaaaaaacaatgagaggatatttctggaaagaagagaaggaaaagataggaccggtgaagtcaactttgacagtttcttaccagagggttgttgtaactgcaggagctggcataaccataaggagccagcacccctaatgatcaccttgaggttgtttatattcctcgatgtaaattctttctctgtatttattgcacctctcctacccaaatcttatagtgaacacacaaatggccttgcaataagtaaccttttggatgaaacttaaggaaggggccaaatttcacttttggggcaacttattataaaacatacaggaaattgggtcaaatgagacaattcatgaatctgaagttagaggtggccatgagcacctgggagtttgggaaatcttcatgagaattttagactttcacaaggtgcagaattggaggttcaaactcatcttccttagacctcaaagggcagggaggctggccccggtcaacttttagttacatatgtattaaaagatattgataggccgggcgtggtggctcatgcctgtaatcttagcactttgggaggccgaggtgggcagattgcctgagctcaggagttcaaaaccagtctgggcaacattgtgaaaccccgtccctgctaaaaatacaaacaaattagccaggcatggcagtgtacgcctgtagtaccagctactcgggaggctgaggcaggagaattgcttgaacctgggaggtaggggtttcagtgagctgagatgacaccgctgccctgcattccagcgacagagtgagattccatctcaaaaaaaacaacaacaataaaacaaaacagatattcataaaagacacagtatgatactccataaacatataagagttcaacagatagggcatttcttacattggcctctgttgggcctcagttttctgctatgccagctctaaatgacacagattggccattttagtaagtgtgtaagtggaggatagagtgaacacaaggaccagagtcagactgctcgagtacaaatcttggctccatatttatttactgtataatcttcagaaagtgactttatctctcaagtgtgccatgcaaatagacagtcataccttataggatttttatgagaatgatgtgattaatatatgacaggtcttagaacatcacctgttaagacctaaacaatcatgttatttttcttgttagagttcaaagtgattgcacacttacgtgtcctctcaacattgacataaactattcttatccgaatcatagaagtggaaatatcattcaatgaaaatgcaatgagccagatagtgtggtgagtcctggagttgacaatcatagcatcagtgcaaaatggcaatgcctctctcatctaatcttctggcctgttagaaagcccctaactaggtagagaggagaagcaggagggttagcatgatgcactggagacagtgaagtcagacccgtctgactctgcttcctgtagctgcatgacttccattgagatgcttaatttctctgaatcttggctttattacctttaaaataagaataataatatcttgttttagggttgtgatgagatttaaatgagtcaacatatataaaatccctagaagaatgcacaacactcagtaagtattggtgtcttcagtctctttccgtaactatgttacaaggagccagagaggagcagagtaagtgcttttaactgcccaggaagatgtccggtgtgagtacttcatgggagaagtcaaccaaatgagaagttgagggagcactacggtttccatgagggcattgtgtggtctccttcttctatgcctttatggctaatgcagtacttcaaggtagaattggggagggtcgtttaatcacattcaggaagagacataagttatgaaaatgcaaggaaactaagaagaccccaaaggaaagaaagctgtgagctttggaacagctgtgcacattccagctttccatggccccctgcctgtctgcttgcctctactcactcttctgaccacccctttttccccctttctcccctctccctgggccgtttctctcctcttttcctctccccaccttctcctggtttccctcatccccttttcaccctgacttcctcatatgtatctttccttcttttctttctcatcacaccccatctccaccactcccctcctttaaaaaagagggaattgtgtgaggcattggcctggggattggtggagttgagtgactggcatccaggggctggccttgtccccaccagtgatttcctcaagaggggccttgagagggagcagctgaacctcagcatatttgcccacctgtcttggcaactcttcttgtttccagttcctctgaacaaattgggcacagatcactcaggctttaaaacgttatctggtttgtgttcacagtcagtccacagtagagctgttactgcatttcctgggctaggatttaacatgaccagtcaagaagcgtgtctgtgggtgcagagtctgactgggccctgggcccaagaggaaccatgctggacagagggactgtggtggacagaaggaccgtgctggacagactcttggtgcccccattgtccatagcacatccatggcttatttggaaaggacaaggcttccttccaaaattgtacacattagagggctattttatttcatgtcccgaaagtggggtatcactttttaaaagatggagtctagctaataataattaaaaactggatatataagaaggggcatattagggtaaggtaaagggagaaacagcagagctgggaggggagagatgagagcaaaggagaaagttggaaagaaggtaaagtacagcagacaagaagagaaggaggcagggagagagggctcctctaagagattgatggtaataaatctcttttctttaaacattatccggtctgtagtattatgttataacaatacaagacagaataagacaatctgttgtgttgaagtagaccctcagaaatgcctggtctctggggacagatgttgcaaatgtaaagatgggttggtttatgtggtaggctggtagaactctttatttgtttaataactttggtccagccccagccctgagagaatggatgattcactttgcctccccaaatgtcagtccctgttgtataacgtagtgcttagaatgccctacgcttcttaaggggctgctcacagaaagtgtgtgaccaggttttgtgaccagttgagaacctggacagtgctgtcacaataaatagctcaccatggagaccctatgccatctccccagcccaccttccccaggcagaacagcccactcctgggtgtagtgatgtcagtggtatgcacttgccttcctggaagcctcacctactgatttaccatgggatcctaaatactgtctataaatgcaatgctaatttcattaagtagcattgttcccagtggaactgcaaatctccctatcagtcactaatgcttttgtttgagtgggtttagaggatccctatcactccttttaactacctgcagcaggcttgacagtgaatattagttctgggagaggcaggaggagaggaaacccacaattctagagcactggctaagcattaaatctaggactttaacatcatcatctctttaaggggaggggagggaggacaattctgaaagcccagtgagatacatgggtttgcttgagataatgagctctctcccaatttgattttttcgttttgctgaaaacttcataattttgaattaaatgcaagtgatttaaaaatcacagcacccaaacagtagcttaaactggctcaaagagggaattaaacttatggtccctgcttcagtgtagtttatgagcatcttggtctattctaggggtgagtatgtaataaatattatatatgtgtattacatattatgcagcacacataattcagaaaatttgtatcacttaatccactctagaaagtaaatatactagcattaatatgtatgctaaataaaatggcactcgtcacacttgcatattacacatctttagaaatcatgctagtattttctgaagccaggtcaactctgtgtgggtgttttatttgagcacttttgcagcccttgctctcccatccctgaataagggttacacctagccactgctgtcttcctggaagtgttgtttggtggtatttggcaagtagttgacatgtctccaagaaaagatatatttattaactcaaatttcataatgctagaaaggataccaaatgaacatctttccatgcaggtagttagttcaggtgaggtaagagaagcccagctttccatgcaggtagttagttcaggtgaggtaagagaagcccagagaggttaaggcaccttaccatagctccaagctgatcagtgagagaggaggccctagagcctgggctaggacttctgcaggctgacatagtgctcattgtaccatattacactgctctcatttgagtgctacacaaaggcagaaaaaaactcattttaagcattttcatttcctttgtttcccatggaattacaatcctttggcctggcttgagtggacagtggacaggagaggagcagatgaacactggaagctcacgttttttcagccttgtagttagctctcccttctcctcccggaacaggacacatgcatggcccgcagagacacccaccatccctccagctgttcagttgagtgagacagatgctcagtccagcaagtgacccaaagtgactggcaaaaattaattaacttgctgtggaactaataataagctgctggtttgttttttctttccctaacaccagttgccaaagagtttttcattaaggggctgaatgcttcctttgtaaccagaataacctcattagttacagccccatcgtagctggagagtcagacaacaaatcattgtctcctctttagccaccgtgacctaacttgttgtctttcattgtctttcttggaggagtttctgtccaccccaaacattctccatcccttcttcaaggtctctttcagaagtgactttcaagtgtatctacccactgtgtttttcttgacagcagagccattttgtgtttgttaattcaggcctttgttggaaagagaataaacatgatcactctatgtccatatcccccaattccctagcttctttacccaggcacctttggttggtgctctgccattttaattcatattgcacggtgctttacaatgtgtacctcagtttcagagacatctttagtcttaacaaggacccttctatgctgtccccattttacagatgagctcgtggaggttcagagaagtagcatattcggagtcatgcttctactgaaagacacaaatggtattaagatcaggacttctgactctgagtcaagtggtctttctaatccacaacagctgcctctcagtcccttcttttccaatgttatctttacagtccaggttttgcttcccttctcactcttgtccaccttagccttgttactcctttaagacttttgtgtccaactaattagcttaaagccaccaagaagtgggtggcagggcaagggcactggatcacaaaagatccacctattggttcatcctccttgcaacttcaccaatcttacttcaagctggcagcttacctgaactgatgccgttttctatgttaaatattttgcatgggtgctttctaggaggaaaaagtgaggaagcagaagagggagacaccatgccctttatataagcaggaaaaaaggttctgagttttgttctttgaacagttttttttccctgcaaaaagggatggagtagtaggatggagaatgaggagcaaggataaagaagtctgtgatgggagcttcaaacgccatgtctacctctctgtggagtacataaggtttgatccctccttgctcattggattctgagtctctccacaaagagtgcactacctggctttaagtcctggctttaccactcacttgctgtttgactgtgaacaggacatctaacttctttgtgtttcaggttccttgtgtgtaaaatggagacaataatagtttcagtttcatagggttgttatatcaaataaactaatacatgtatgtcacatagaaatgcctgtgcattgtaactattcaatgaatattagctagcactattaccttagctaggaattgagatattagcatttgctttcaatatgttcccctgcctgtgggaagaaatatgtatacattagttggccaggtttaaatacatgcttacagtctcagtcattagtgtcctgtgggatagaaatgtaaagtgcttcagttgagatactttaaaattattcatagaatattagagttaggacggatcttacatatcattcagtcagtccctctaccattccaataaggccatgaaagctgggctttatcatagacttttgtctttaagaacttagtatgtgtgttgggggtggggttaatgaagtatttaatgtaaaaatttacatttttaaaattcaccctttgtagtgtacagtcccatgaattttgataaacacacacagccctgcaatcaaggaaaaaaaatttccatcaccaaaaaaatgttctagtgtctcctctgtttatttaaacttgtatatatacatatgcttgtgaccctcagacagaatgataccttcttagagaaagatgtttgtggatataaatatggacacaggcatttagtagcacagcagctcttctcctatgacccagtctccagctagcatgaccatatgtcaatcagcagagaaatgcatgaagtatgaagtcacttgatatttgacctggattcgttccaagttgcttaaacacaatccttcagaaaagagaaacacatctttatactttattttccattttctttctatgaagagtatctagaacttctataattgttcaaaggcaatccatgtttgtgagctgattttttaaatgagcctgatctctgaaatgagctgagaccttacaactccaaggtgatgagtgttagagtccagagatcatgggcctaagccccagaggactgtcatcttgccctgtgttgttatgagtgagcttttccaggcctccctggactcagctcagaataatctgagggaggactgaatgcgttcctcatgcactctgttgttagtgaaacctcagtgttagtgtgggaccccgtaagatactatcttcagcatttttttcttttacccccaaaaaatggcttggaaaaggtaacatacagaactggtgtattattatttgctatttatttggacatcttgacatcttcccaaaattataaagcacaaaaccattaattaggttcacaaaaggtgcacttccctgtttctctagatccttagtttgttaatgtcaccatattcagcccctaccagcatttttataataccccagtattgccaagtttccacctacaggaacttcctgagtctaatccaaagaaccttcttagactttgaaggttgataaatcagagacagacatggcttattcttgtttttgcactttcctattagtatttttggacatttctctgatttatattcctggaaaccaatatctggtcttcagcagctcagatactttcagcttttgaagatgtcttcagttggtagaacaaaagaacttgttttcttagcctacagtaagcgaacaatgacagaagcagccagttcgtcatcttttctttattaacagatgtcaaagtaattgatgagggcttttttttcaacctttagtatattttttaaatggattgattctggggcatctcagttcatttactgacagtgtcttaaggaggggaatgtggctgtaatcaattttcattatcattgtgtagctaataagcctaaaaataagaactcttaatttgctatggcatgattgattacccaagaagaatatggaaataacatctttcaatatgcctggagagttacattagacctctaaaatttccatcttcaaaacatatcacttcctataattttctatccactaataaaataactcaggactcataacatcacttttctctgggtcctaacctcaaagggtgatctccagttgcaattttcatattcagtgttcccctacccacaaactgtatgacccaagcttcctttttcatggattctttccatcattgtttctctcaaaataattactggaaggcatgctagacctggaagacccaaagcagcttcctggagcactgactgtttgtataactctccctagaacaaaaggaggtcatctggagcatgacagccatcacggagtctccaagatggtgtggtaaagacagaaagctgaagatcatatactcttatgagcaaaccactgggctgggaataaggagaacttgggtccaagtgccaactctgtttcatccttttggccaactcttttaatcttttagacctgttttctcgtctgaaaaatgaatactaaatcccatcctatctcacagggctgttggactatgccagtgacataatgtgtataaattcactttttaaccacacaattctgtatattattattattgttgttactgcaacagagtcttgctctgtcacccaggctggagtgcagtggtgccatctcagctcaccgcaacctcccttcctgggttcaaatgattctcatgcctcagcctcctgagtagctgggattacaggcatgtgccctgcccagctgatttttgtatttttagtagggatagggttttgccatgttggacaggctggtcttgaactcctgatctcaagtgatcctcctgccttggcctcccaaagtgctggaattgcaggtatgagccactgtgcccagtcctgtatatgatttttactactttttctcatcttctctatctccctattttgaatcacctcttcctcataccgtgtatcttctcccattcctttaccttctgataaaactttagccaccctttgctcctgcctgacatttattgagcatccaatccatatctggtcctttgggatatgttgggacatttaatctttacagtaacttggtagagtacttattgccatgacccttttacagacaaagaaactaacgttcaaattaagttaagttaggtaagcaagaggcaaagtcatgatttcaacggaagacgatccaaccctaggtcacagtttctcagtgaggagcttctcgagtctaattcttggtctggtcaaattaaaagacaagatgtgatgtacctaaagacagggcgaagggagaaggagttggggaaagtcccaggtggataaactggtggctttttccctctttagcatcaatatttcttgtggtttttaaactatccaggtgagggtggaaaaaaacacagattgggtttctcagctctcacgccaaaagtcaacacagatagaagacatctgtgaccacatgtatggagattttccccgcacaccaagcaagcaggaagttctgcagcaaacaccagctgggtatcctccagttcagttctattctgacactatctacctggagacagcgtcagactccactggttgagggatcagtccccaaaatgcccctgcttcctaccagtcttaagtccaagccttaggaacctctgcctgaccagcttcaagttggggttctcaccattgccactttgggtttgattaatttgctagagcagctcacagaactcagagaaacttacttatgtctaccgatttattataaaggatattacaaagaatatagatgacaagatgtgtagggcaaggtatggggaaggggtgtggtgctcccatgccctctctgggtgtgacacctccaggaagttccagatgttcagctacccacaagctctctgaaccctgttctttggagtttttatggaaacatcattacctaagcgtgattgattacattattgaccattggtgatcaacttaaccttcagccactttgtccttccctgaggctgagggatgggactgaaagtccctatcttctaatcctgccttggtctttccagtgaccaaatcccatcctgaagctacctaggggctgccagtcatcagtcaatcattagcatacaaaaatgcatcactttggaatttttaaggattttaggaattgaatgccaagaaatgggatcgaaaatgaaacatatttcacaatatcacaccaagaaactttcattatggaaaagcatggctcttaatggatgcttcagcattcttccctttgagtttaaatcacatcatgcaaagagaactcgttactccttcattaaccaagctcaatcattttttatttcactatgggcagcagaccctaagccaggggttcccaatctgaagactataatgcctggggagttatgataaggaatccagaaatttatctgtggactaaaaagataaaatggctgacatctctaggtgctattttaaaaaaatatagatgaaatagtgaataataaaatagaaatttgtttaagagcatcactaaattcacaggacagtagaagctctcttaattaaccttccctttaccagctctctgtattagctttccctctgtaaagtatcatttttttaaaaattcccagaactgagcagaacactctgtaaattatcttgattgatgcccatagcatcctgtacactcgaggcctataggctgttcccttgcatacatgcacacttctgctcaccagttaagatgctcacttcccaagaggctattgtatttgttctaaaagatatttatggtaattataagattcaattgcaatgcaaggagagagctattgtttctatgaaaactcagttgaatgctgcagaaagattcaataaaggcaagccagtacaaaagaagttgctgctggatgaggcaggacccctgagaacgactctcaagttgtcactacacgactccaagggataccctgtggctgacgcctcctcgagttgtgcagggcataactgcaaaacagcacacagaagcctttgaattgggtgactctcagagtttggaaagaaaaacataaatatctctgagaagatgctattgaaaatgatcctcagatctttttaggttcttattccccatcacataaacccaaactgaaaattataaccaatgcattaagggtctgataaatgtgagaaagatgctacgcagaagacattgaccttggacatgaccctctatcaagagattggtgtatgaatatgtgtgtgtgtgttagttaaaacagaatgtttaaggtatcataatttatggttctcttacttaactagctctttaaattaacatttgtatcactactccttagggattccagcctttgcttgttttacacgttcccaaccagcttgaagcgcagcccccactatcatgtcaggaagagtggtctggatgtgagaagctttgaagttacagaggagatctctttagtggcactcagatagctcttaactgagaacagggttgggtaattccatcattgtcatagagggggctgagatttctgcaaacacccatatcggcttctgtgtctgccacacactccctgaacatcccacaccactgttgtttcaagaactccaagtcaccgtgcggcgactagcagactctgcattctccataattacacccaattttccaattgaattatcgcatgatttaattcgtttggtgcatctggagagcatcagcattgtgcagctgttgcagcttcaagagctaattgttaccaagcacattaaaagtagccctattgcaatgctctgaagtcagaggggagggggcacacactttcacttgccattttccctttggttgaatcatcacccaaagagcctgagggggtagcaaacatttaagctctgttaacacggagacctcatcgggtatggttactgtcactggatgaaacttcttaagtgagtcagacatatccagataccagaaaacagagaaacctgaaagctctgtttggcatgtcttagagaatcatgccaaataagattaggttagaaactaaaggcagtgttaaaggagagacagtgcttcatcaaaaagtactaggaagtcgattgttaaggaagccccgggacgtcttaagaccccaaatcttacttctagtaataagccaccttaaagagagttacccttttccataatgaaagtttcttgatgtgatattgtgaaatatgtttagttttttaatcccatttcttggctttcaaatcctaaaatccttagaaattccaaagtgatgcatttttgcatgctaatgattgactactgactggcagcccctacctggcttcaggatggggtctggtcactggaaagaccaatacagaattagaagattaggacttttatagctgctaacctatccatatgttcagttcatcttgatatgtttcattagagaatctattttgtatataaccatttgaaggcttgcttcagtgtaaaatactccctaatattcatctgcaatctcttgttacttagggtcttagagtcaggggtctgaaactctggaaggcatgggttggacacttttccttccttcccttccttgtggttttaaggatgtggagtttgattcccaaagggtctctgtcctctgcatagattttgtggtctatacatatgctttcttatgtgaaagataaaaatcatgagttcatgaaaagatattagggttatcatatctgagctgagggctagccagggaggaaagcaggccatggggggccaaagtaagggctggagggcagaggtgagtcaactgaaggagagaatagagggaccctaaatggaatataaggacagagtccacaagccaggcagaggtgagagcatgggtgcaccataccaaccaccaggaggttgaggaagagtctgtatcctgaacagtgagatgtcctagcctgctcctctttcagacttcagaacagtgtagttagttgaatgcccccctactaaggaaaaaaagggggttattcctcaaggagactggcatgccccagagaaaaatctgttattgccatggggaatcattcaatggttcattcctggcccaatcaccctcctatgaagtttacaaggcaacagccctcattcatgtgcatagaaattccaattggctttgaatttttcataaagaacaaccaaggatcaacagatatttgatgatagcagttctaacagaaagcacagtgactgaaaccaaaacgcaaattaaaacaaaggtcggtggtgaggtggggtgagggtctcagagtcaatacggggagcaggaataaatatgaaacacacactctgtcacacacacacacacgcacgcactttctctctctctctctctctctctctcacatacacacactctctctcacacacacacattgtaacctcagaaagtgtccagcataattgaatcccacactataaaaggcatacacaatatcatataattataaaacttcagagtaatagaaaataaagattgtatgtcttgcaaaggaaaaaatatagatcgtatacaaatgatggggaatcagagtagcatctgcattaacatctgcaatttggggacctagaagtcagttgataaatgtgttcaaaatgtgaatggaaaataatttccaatttagaattccatacccagccaaactatcattaaatgtgaagttaaaataaagattttttttacacatgcaaagtctcaaaatatgtgcttgttgtgcatccttacttaaaaagttactgaaggatatgccacatcaaaataagagaataaaacaaagaataggaaaacatgggatccagaagacagaggatccatttcagaagagaggaaaagagaattcctagcataatgtcaaaagaaagtagtggagtgaattgaaagtgttacatgctaccacatgagtgaggcttgaaataatgatgctaaatgaaatcagccagtcacaaaaggacaaatactgtatgattccacttatatgaggtacctagagtagtcaaattcacagagacagacagtagaatgatgattgccagagactaggggaatgagggagtggggagtgaattggtgtttaatgagcacagagtttcaggtttacaaggtgaaaagagttctgaagatgggtggtggtaatggttgcacaggactgtgaatgtacttaataccaccaaactatatacttaaaaatgagtaaaatggtaaattttatgttatgtatatttcaccacaattttttaaaaaaagaaagtgtatgctctaggaagggagaattaggagggaggggcagctgtgttttgttgtaagcctagagtactaactgatttttcaaattatttatgcgtaatacttcaataaaaattaaaaaatgtttaaacctaaaactaaattggggtaggcattccaggccaagggaactgcatgagcaaagtcaatgaggtgcaaaacagcgtgcagagaactttaagaattttcttcttcatggagagggttgaacacattgggtaaaggagctgcagctttattctctaggcagtgtttccctacagtgtggagcacacttacagatgaacatgataactttgtcatccaaatccctacatatttaattttaatattatcttctattcataatgaatgacacattgggttttagtttatggtgatgacaataatgatttagattccctaaactgaatctaagtttataaatatgagttggttttaagaaaaacattaggtgaataatagagaggcatgtgactgtggcaaaaaaaaaaaaaaaaaaagaaaaaatcatgaacgtggtgcatggattactatggtagatgaaacacttctctgagcaataggaagcccttgacggtttgtgtgaaaaggggcattcaagctaagtgtatggacgggcttaatcaggggaatatgaacttcattctacagctccctcaattccggacgcttcttcacaggctgccttgaggtgggatgaaagagagagcttcaaatagagatgctctgttctatatatgagtctacctataattacaaaggagtggccactaaacatgaaagattgcaggccactgagatagatcattctggttaggtgggaattaggggagaaagactaagaatggggaagtcaactgagaagctgatgcaagtgacctaacaggagactatgtgggcctggcccaggacagtatgcagggagaagaagagacatattagagatgcagagctcctaactgaatgcccagagttctacctagtggcagctcatctgaactataagtatagcacttaaggagagatacacaactcttagagaacaagccttacatgccacaatacagaagtgatggcagaagttcattgccgtattgaattttctaacgtaacttccattactaggagcagttgtattcaaaactgattttgccaagcccagaagaatgtgaaactggaagaagagccatatattatattacaaggaaactagacttggattcatccattcattcatccattcattcaccccacaattatttgttcaacacacattgattcaatacaacagtgcaaggaactggtttatacacacagacccatcagtgaacccaatcaacatcaatccctgctttcttgatccttttacactcataggaagaaataggaaaaataagcaaaatgtacaatatgttgaaagtaaataagtgctataaaggacaataaagcaaggaaggcaggagtggtgtggtgcaatttttgaaagggtggtcaggaaagctttgtgtgacagagaaatttgaacaaagaattgaaggaggtcagataatgagccacacagccatcttgcgagggccgaccaggcagagggagtaatgaccacaagggccctgaagcaggagaatgcctggaatattcagggatggcaagacgaccatgtggctagagcagagtaaggcaggaggagagtggcaggagatgaggtcaaagaggcttcagggcaggctgtaagcgtcttggaaacatcataaggactttggcttatactcttagagaaatggaaggttttggagggtttggagcaaagggaaaacatgttctaatgcaagttttaaaaggaccccttcagctgtcaagttgagactatagtgaaacaagggctgaagcatgtagatgtgtagaaatattttcaagaaactaagcaagaaaaagacaacttgtatcagatgctggaagggcagatggtaaggagtggtgtttttgaggcggagccaatgacttggacatagaatgtgagagaaagagaggaaacaagagtgacttcaatggttttggcctgggggggataaagttgcaattaattggggttagaaatgactacaggtagatcaagtttgtgtcagtgactcatgaatttaggttctaatgtgggaaactggaatcattcaatccataacaatggccaagtggagatcttaagaaggaagagagataaagggccctggatctcagggcagtggtctcggctgaagatacaaatccagggtcttcactggggagttgttcactagggagatgagactgaaggagatttcccaagggaatgaatgactgtagctaagaaagagtagaagaccaaaggctggtccccatggaactccaatattagcatcttggggagatgagaaggaactagtaaatgtgattaaagaaaggatgatgaggtaggaggaaaaccaagagagccctgtgtcccagaagtcaggtgaaggaagtgtgggtgtgggagtgaccagctgtgggtgaatgctgtctatggccaaggaagagcatctgagggctgagggttgaccactggatggaacaacacactccttgataggagcagtggtggcacaggatggcggaaaaagcctggctggagaaggaattgctgggccctggtccattccaccaagtcaccatgcaacttctctagggccagtcttctcatttgtaaagcgaaaaagctcctactagctctaaaattctaagattttatgatgattctaatggagtacgctttattcttttcatgaaaatgataccatgagagtatttggaatctgagaaaaatgtgggtgaaaatgcgggacattcctcaagctgaccattgggtcttatatgaaagaagccaagtttgtttcctgttgaaaacaactgaatacacactttctgacttttcccacaaggaaagacacctcatttatatttgtatttttggttttgttccgtgtgtaatattgatcctatttaattaagatttccagactctcattaaacagagtttattttgataatttcccaaaactgagcctttacactttgataactccacctttctcatagatgcacttacccactaccacctggtggtagcaaaaatattacaaaagagaagaaaagaggagaaagtaaaggctcttatttttagtttactaggctcaaggattggacctggatctttctgggcagtcttggctttgggacatctccaaggcctccaagactgtgggacctggaggaccctatggagaattgacattgggtgcttggcctggagtccttgcacccagagccagtgaaatctaaacacactgaatatttatgagatattcctaggggaatgaaccaagcaagtcaggatcattataattaattctgattttctgaaactacttgaaatttctatttaaggaatgatccatgcatgaattgtttttaaaacttacctttttaatacgtacttttagaaatttgtttctagtaaaggttgagctttttgtttttttttaaggtcttccatctgtgtcggagacaaactgagcatatctggttgctaggggtataaacttctataaatgatcagcaagcataatggctagcaatttgattcctacatgaatggagaagttgctgctttccctggagagtggggggaaaaaaaaaccttaatttgaaaagatatataggctttattctgctcttgcaaagacacacagacatgactgtaatctctctgtgtttctgaaaccacagggaaagctagaagcagctctaggtgaaaaatactgaaggatagcaggaaactactagatttctttcctttttttttttaaatatactttaagttttagggtacatgtgcacaacgtgcaggtttgttacatatgtaaacatgtgccatgttggtgtgctgtacccattaactcatcatttaactttaggtatatctcctaaagctatccctcccccctccccccaccccgcaacaggccccagtgtgtgatgttccccttcctgtgtccatgtgttctcattgttcaattcccacctatgagtgagaatatgcggtgtttggttttttgtccttgcgatagtttgctgagaatgatggtttccagcttcatccatgtccctacaaaggacgtgaactcatcattttttatggctgcatagtattccatggtgtatatgtgccacattttcttaatccagtctatcattgttggacatttaggttggttccaagtctttgctgttgtgaatagtgccacaataaacatacgtgtgcatgtgtctttatagcagcatgttttgtaatccctcaggtatatacccagtaatgggatggctgggtcaaatggtattcctagttctagatccctgaggaattgccacactgacttccacaatggttgaactagtttaccgtcccaccaacagtgtaaaagtgttcctgtttctccacatcctctccatcacctgttgggaaactactagatttcgattgttatagtatgcccatttcctcccctccctaacctgattgatctgagccagctcaggaaagagggtctaagttataagacagagccacagttataaatggcctccccactgttcacccgctcctggctcaggtcctcattgccctccaccaagccttttgcaatgcccatcctctaggttttcagtgtccaattctcttagccagcattttcctccaaagactcaggcttggctttgtcactcctctatttagaaagttattggttgctcctattgctttagaataaagatcaaatttcttagactaaaattaaaaactctccacaatctttccaacatattttttgaattacttgtcttcatgcaggggccactcaagtcaactttgttatgttcagatgtccacacactatatgtggtaaccagtttgcctttgcagatgccattccctttcctggtgatgtatcttgcttcccagtaccagccctggaaactttaatacctgcccatatcattttaacttttcaatgcatatttcaaacccaccatgacccccaagaaaccattattatttttccccagccaaaaagattatcttctttggctttcccccataccattttatctctttggctttcccccataccattttatctctgtctcttttaaatcttcacttcttactttctattaggtgttattattattcctaaattttaaatctctaataaactctgagctcccagaggaaagaggcaggttggatttaatctcacatagtatgatacttggggtaccaaactatgtaggtgctaaataaaagttggtggaataaatgactaaatgatagttactgaaacaattcctgaagacagtaggcaaactgagtttaaattcaagtagagaagtaaatatggaaagagattgggatttatccatgtagtactaatggaagaaattataacaggttttttgttgttgttgcttattttgatttgcctgtttttctttttttaaagaagagctgaataggtgagagttgagtctgagacaggagagaaactgcagaacacagctcaggatgagaaggacccagtgaaaaaggaagctgaaagagaggaggatatttaatgcccctgagaagaaatttatgccgacccagatttgaagtcaacctctgattatctactatttatatattttaaagaaatatgcaggagattttagtgcttccttttttgtttgtctctcaatatatgcatgagccagcacaattcaggacttgatttacctttgctgattcggcttcttttctctgagcttatttatggctgtgagagaggcattctgtccttgctgataaaggacaaccgaattgcattcaaagctcagccactgagttgctttgcttctgctagaaagttggtttcttctccaatggccaagttttcctgaactataggaaataaggtgcatatttgaaaggtagagtcctagactagaacttctcaaattttaatgttcctccaaatcttccaggactcttgttgaaagagtaaattctacttcagcagttctggggtggggctgagagtctatatgtctgacaagctcccaggtggaccacactgcaaagcagtgtcctagacttttgaagacagaaggaacttgagaggtcatccaagcaagtggttcaaaatacaaattctcaggctccacatacaaagaatcatggatggagcccaaagaggtgaatttttgataagtttcctagctcattcttatgtatacctgggtttggaaaccacaaattagtctgatcccccattagggatagcaaaactgaggcccagagactaattgaattccatgaagaaaagtttctgtttatatgaaaggggctttcctgaaaggataacccttatacattttgctgccctaagtgaaggttcccctttaaagccacagaaataactagatcatctatataatttatttcttaaaagctactagcagagaaaagcaattttttctgcctcttttagaatgacaaatactctaagttattttagttttgtgctaatagtagggggtggtggtggtggtggtaaggaatggctattaagcaattatgttattcaaacacatcattattattattaccaagatgagtggactcattataattgaacaataaaagcatgaatgactttgcattgttattagtgtctgtctcagggcccctgtttttcccaggggctgttcagcagatccaactcacaatgtactggacttgcggtggttcacttgcaggcaattggattgttttttcagaatcacgcgctgtggtcatcttttcttttctggtactgacctactgttcattcaagactcttgccgcccccacctcctgctcagaaaacctaatccttgaaagactgtggcctccctgactccactcttgtcaccttcctatccttttttttcacacagcagctagtgatcatcagaactgtgaactggcattaaaattcccttgcttgaaacctgccaatatctgcctatttattttaggataaaacacaaatccttggcaaagctttccaggcccttaatgaagtgtgccacttccttcagcagccccactgggagctgttcctcttcttcccctcaccatcactgcccccgccaagcactatactgttttcagcttctggaatgtcccgacatctccagtttctggaatattctaacacctctctgacttaggggatttgtacatgctcttctttctattcataatactctttccctagctgtttagttcttatccttaagatttcagcttaaatgtctatttctccttcactacctgactaattcaacaccccatatggaccccttccataatcctggcacttcaccattggtagcggtgtctacaccagtaattacttgcttaatgtatttcttcccccactaatagtaagccccaaaaggacataactgtcctttcgagactaactccatattgttcaacacatacctggtatattaggccatcttcacattgttctaaagaaatacctaagactggataatttataagaaaagaggtttaatggctcacggttctgcaggctgtacaggaatgtggcctgtccagcttctcatgtataggcatgtacagaatgtggcgcctgctcagcttctttcctcaggaaacttacaatcatggcagaaggcagaggggaagcaggcacatcacttggccagagcagaagcaagagacagatcgtaggaagtaggtgtcacacacttttaaacaaccagagctcatgagaactcactcaccctcatgcggacagtgccatgggaccggtgccaaaccactcatgagaattccacccccatgatccagtcccttccccaccaagccccacctccaacattggcgattactgttcaatgtgagatttaactggggacaaatatacaaactgtatcacccggcacatagtaaatgcttaatagttacttactgaggagatgaatgtttgagaatccaccaggtactgaaattgcaatagagaatcatggagacagaagggggaactggaggcactggacctccctctgtctaattcgcagcattaggtgctgagcttcttcttctgtagttgcatctcccctacccctccaccatatgtttaaaaaagtttaagtgattaaaatatgttttatccctaagttgaacgtcaagacccagcacatttgatctaggtttcctagaactgtggtggcattgttactctgggaggatatgtggatgaaatcatgcaaaccctggacctgaactttcataggatgttgtcgaagatgctgttcacgacagcactccctgttccctatgtaaagacacacctaagaaatgtctcttgtagatttaaatgtcaggaagacctttgcttccttgaaaaactgctgagtgtttgccttatgttcactgaattcgtgaaccatgtttttctctcttagctttgactgccagaaagctcagagtcacattctctgctcaatttttgtaactgtagaagcctatagctcgcacacctggcaatgtaactttgccctagtcttgatttcctattctataaatatattctccccggtctcagtttattaaattatttgtagctttttattttagagtgcaaagtcttgtaagtttgctcaaatccttagtggaatgtggcaaggagatatatgaaagaaagaaatgcatgaggttctgagatacattccgtttaacttgcagagggttcctatctgtgggtggtcctggcaggggcagtgcacagaaggagccctgctgacatgggtgtctgtgcaccacgcaaggacacagcagggtttctagaagaggaaccctctggaacagcttacggaggtggttttgttcctgatctcctgccgaagctaccctcaggtgacccagaagtgtgagtgatgccgacctccatgcaagatccgaatccttttctggggagtggctaaatatgagccctgtaacctgtcctgaaattctgtgtgaaagctagatttctgctggcatgaggtcttctactataaggtcagaattagagtgttttcttagctaagactataatttcagctactttctaattctccttacgtgcccagtattgctgtagaagccctatttgttttcaataaagctggcatttatttcttgtctaagagagcaggagcaaccatgtggtccacatgtactgaacacgggatgccatgcatgtccctcacacaggctgatttgtgaaggagcctcattctctgcattttgtatatgggtaaaacatgtataaacatgtatatggctcagggagagagatttgtcagaggtcactagctaatgagagggggtgctgtggttcagtcccagtcttctgatcccaaataggcagatcctctacagcccatttcagatggtgttagaacagagaaactgtagggcaagaaacaggccactccatgggtgagataaggagctgttccatgtgaagctgggaaaggactaacaggcaggcagaagagaaaggacgagacccttgcaaggattcagccacatccttggtgtacatgcccctgccccagcattatccgcatccatctccccccacccccaccctactccatcatccttgccctgtggtcattgccacaaacaagttccctgacactcgaagctgtcctggctgtcatcattcttgtctccccaaacaaaatgaagattgcttgagtggagagctttcatccacagccttgttagggtaggaggagctcttggaaggtgtatactagtcaatgaaggtttatattggcaaaaagttactatgtgttgatgtacagtcatgttctgtgcccctaggcacagacttcacaataacttggtgtggtagacaccattacctttctatattgcaggtccccatggtcatgcagttagcaggtgctggtgtcccagcttcctgcctccgctttccgccattgttgagatgccaaaaatggctatcagagccctccaagtatctcaagtttaaggtgtgctttagggaaaacggagtcaatagagaagaacatattccacagccctctaaaaagctctgatctgaacactagagctctgcttatttcattgacatatacattgatttttttttcaagtttatttcaaaattctgtatcgggtttaattaccagcttgagttttaatagcaactatatatgttttaattaaacttattatgttgaaagaattatggattcatatacagttataaaataatatagatttcatttccctttttacacaatttccactaacagtaatatcttgaaaacataagtgtgatatcacaaccatgatattgacattgacagagttaaggtacagaacattcccagcaccacaaagagtcctctttttttttttttggagacggagtcttgctctgtcacccaggctggagtgcggcggtgcaatgtcggctcactgcaacctccacctcgtgggttcaagcagttatcctacctcagcctcccaagtagttggtattacaggcctataccaccacgcccggctaattttgtattttttagtagagaagggatttcaccatgttggccaggctggcctcgaactcccaacctcaaatgatccacccgcctgttgcttttttatattctcatccacttccctcctctctcatcacttccttaacccctggaaactactaatctcttctccatttctacacttttgtaagtttaaacatgctatacaaatggagtcgtaaggcataaaacctgttgaacttggcttttcttactcaccatacattttctggagatgtatctaagttttcacacgtatgaataatttttttcttttattgctgagtgatattccatggtatggaggtaccacagtttgtttaatcatacatccatggaggaacatgttggtttctagtttgggaccattatgaataaaattgctctaaatatttgtgtacagatttttgtgtgaacatgtcttcatttctctggaatacattttcaggagagcaaccactgagtcctgtggtaatggcatgtttacttttataagaaactgccaaactgtcttccagagtggctgtaccatgttactctcatcagcaatgtaggagtgatgtagtttctctgaatccttatcagtatttggtgttgtcattttttattgtagccattctgacagatgtgaggtgatagctcagtgtggttgtaatttgcgttttcctaatagttaatgatatttaacatctttcgtgtgcttattttccagctgtttatcctttttgatacaatgtgcctttaaatcttttgcctgttttctaatttgaatatttttaattgttgaattttgaggtttttaaatattctagatactagtcttttctcagaagtgtggtttgtaaatattttctcccagtctgcagcttatcttttcatcctataaacaggatctttttgcagagcaaaagtttttaattttgatgaaatctaatttaccaaatttttcttttatagatagtgttttttggtgccaagtctaagaactctttctgttgccctacttcctcaaaattttatcctatttttttaaagtgttataattttacatcttacatttaagtccatgattcattttgagttagcttttattaactaaaaattctgacctaaggtcatttgtttcttctccatttttctttatctttcttttcttttcttttcttttcttttcttttcttttcttttctttctttctttatttttggcctctggatgtccaattgctccaagaccatttattatttgttgcaagcctatccttcctctattgagctgtttttgtacctttatcaagaatatgggcatatttgtatgtgtctgtttctgtgttctcatttcattccattgatctatgtgtatattcctcccccaacaccacatgtcttgattactgtagctatatagtatcttgaattcaggtaaagcaattcttcccactttattcttctttttcagaagtattttagctattctagttcctttttcacaagaatcttcctgggattctgataggaattgtgctaaaccttgtattagtttcgtgtggccgctgtaacaaatgaccacaagcttggtcatttaaaacaatagaaatgtggctggacacagtgactcatgcctgtaatcccagcactttcggaggtcgaggtgggtggattacttgaggtcaggagttcgtgaccagtctggccaacatgatagaaccctcacatgtaccctagaacttaaagtataattaaaaaaaaaaaatacaaaaattatccaggcatggtggtgcatatttgtaatcccagctactcgggagtctgaggcatgagaatcacttgaacctgggaggcggaggttgcagtgagccgagatcacacctgggggacagagtgagactctgtctcaaaaaataaaataaaataaaacaatagaaatgtattatccagagttctaaaggccagaaattaaaaatcaaagtgtcagcagagccattctccctcaagaggctctcggggagaattctttccttgcctcttccagcttctggtagctgctgacatcccttggccacatcactccaatctctgcctgtctttacatcataatctctgcataatatctgtacaattgtcaactgcctctctcttgtaaggacacttgtgattgaatgtagggctcacctggatcatctaggttaatacccccttgtcaagatctttaatttaaccatatctgtgaagaccacatttccttataaggcaatatttagtttagaacctgttatctttgggtggttattattcatcctgttacaaacctatatatctattttggggaaattgacaactttactatattaagacttccaatccatgaacttagtattctttccatttatgtagctcttctttgatttgcatcatcagcatttagtagttttcagcacacaaattctgtaccggttttgttagatttaagcctaagtgttattttttgagtaattacaaatgttattgtattcctaattttgatgcctgggtgttcattgctagtatagagaaatacaattgatttttgtatattgaccttgaatcctgcagccttgctgaattcacttattagttgtaggagtattttgattaatcatatattttctatacagacaactatgccctctgaaaatagggacagttttatttattcctttctgatatatatgtcttttatttctgtttctttgtttgttatttatgtatttttgccctattgccctgactataacttccagtactatattgaatagcagtcgttagtgtggacatcttgctttaaatctcagaaggaaagtagtcagtcttttactattatatacagtgttagctatagagtttaatttgtagatttatcaagttgaagaagttcctctctccctatctacttttctgggttttaatcatgaatgagtgttgaatttatctattgctttttcttcatgaattgatattatcatgtgatttatcttctttagcttgtcaatatggtacattatattgattgatttttttaatattgaaccagccttgcatccctgaaatagctcccagttaatcatggtatataattctttttatattgctcaactctgttgggcaatattttgttaaagatgtttgcatctatattcagtagggatattgatttggagttttgcttttgttttgtactgtctctgtttgattttggttttggagtaatactagcttcataaaatgaattggaaaccagcaccgcagtgtgtcactaatcctagctattcgagagggtgaggcaggagaatcacttgaaccgggaggcagagggtgcagtgagctgagattgcaccactgcactccagcctgggtgacagagcgaaaaaaaaaaatgtgcaccagtcatcctttcatgaatagccaggacacctggacaacatagtgagactctttctctaaaatatatataaatgaaatggaaattgtacctcttctatttgtatataattggtattaattctttatatgtttggtggaatttttcaataaagccatctggtcctggagatttcttttgggggagtttttaatggcaaatttattatctgaatagttacagggctgttcaaattacctatttcatattggttgacttgtggtggtttgtgtttttcaaggaattggcccattttatctatgttgttaaatgtatacgtgtagaattgtttgtagtattcccttattacgcttttgatggttgaatgctccatagcaacccttgtttccttcctcatattggtaatttgcattttctctttttttcctttgtcattctagctagaggtatgttaattgtattgatcttttcaaagagctagctctttgttttaattaaattagtctattgtctttatgttttcaatttcattgatttttttctctatatttattatatcttctgcttgctattagtttattgtgctcttctttttctagttttttgaattgggagcatagattgttgatttgagaattgtattcttttctaatgtaagcatttggtgttattaattttcttttcatcactgccttaactgtgtcccacaaatttcgattttaatctagttcaatgtgttttttaaatttacttgagacttcctttgggatctatgtgtaatagctgacatgggtaaatctctcccacacctcctgagctcagaacaagagtgcagccttttcagcatgttctaaagattattttgacatgatcactgttatgactatgatgaagaaaatatttccaggaatgagaaatcaggtcattcagcctatgaggatcatcatggacttagtccaccaccagcccaaagtgtaagatgtctgctcaggcttccataacaaccatagatgaggttgtgtaactaagagagatttctgttctagaggttagaagttcaagatcagagtgtcagcgtggtggatgatatggtttgttcctgtgtccccacccaaatctcatcttgaattgtactcccataattcccaggtgttgtgggaggggcgcagtgggagctaattgaatcatgggagcagtttcccccatactgttctcatggtagtaaataagtctcatgagatctgatggttttatcagggggttctgcttttgcatctttctcatcctctcttcgcctgccaccatccacataagatgtgacttgctcctccttgccttccaccatgattttgaggcgtccccagccatgtggaacagtgagttctccattaaacctctttcctttgtaaattgcccagtctcaggtatgtctttattggcagcgtgaaaatggactaatacagtgggtttccgctgagggctctcttcctggcttgcagatggctgccttctcactgcatcttcacatggtggggaatggggagagagaaagatttttctcttcctcttcaggtaaggccaccaattctatcagattagggcttcagccataattaccttttacaaccttatttatttaaatttaatattatttactataactttaatttaatcttatctcttaaatttaaccatatttatcttctagattactaaatgtaaccttaattacctcttaagatccctatctccaaatacaatcatactggggcctaggacttcaacttatgaatttggcaggagagggacacaattcactccataatacttgcattcccactaaccctgtactctacaaggaaaacctggctgttactcacatctcacagtttatttctgtatcactcatttttattgactcatactttgtgcaaagctctgcaccagacagcacgtaggcatgccctctgggagttaccacctatcctgggggagagagaagaagaaactttctacatgacccaaccctaagagatgaatccggacccacatcctgtctccaccagttactatgtgcatgggatttgtgcaattttcttatttctacccttcagtgctgcttagaagcaatccctattctgcctccaagagttacaatgatcgaatgatacatgtgtgagatgtgcacgtgaaatacagtaacacacaatacatagctgtcatatggtagaaaatggtaacctgattcaggtcactagagcagaggatatgtggctagatagcaaggagactgaggtaggacacatggaatgggattaaatggtgtggggccttgagggccacgttgtgatacctaatctttattctcaagccaggttaactgtgaagttcagtgcaaatctgatttacagctttcagaaaaccttcacattcattttcatttgatgtatgaacagccttttgaattgcacagggcaggtactgttttttcagttttagagatttcaagcaatgaaatcaaagaggttaactaattcactaagatcctacagctagtaggtagcagagctgggatttccaactcctgttccagtcctgtgtcagcagccctgccagctgctgcaggaatgcacaacccgtcccaggatgggatctagaattaaagcccatttccatgctcactgttccacaaatattagtagagccagaagcagaggctcctccatgtcagcaagattcccctgattgatctgaactgttttgagtttagaaacagcttacagctctaatctgatgtgatgataaaatctggatttcctttcatttgtcaaagttttacttcatctgcatcaccctcatcatgagatatagcctaggggcccaaatcatcgcttgttcaataatgcatattaatggggaattttctcaaatgaaaatgagcgatatctatgacataatgaatgcccaagtttttcccaaatcttaaagctgcatatataactatgaacatgtgttattcacttacatttttatttagtttgtgtagattcagttagtacagtctcaccgtggtcattttatctacagatctgtgaatttgcttttttatttgaatacgttgcacatatatgtttttaaattgctacctttcttgaagaaccctaagcaccatgtgctatacaaatcgcagctaaatacatctatatagagagggatgagtaatggatcttcatgaacaatggcttatgtgatgctggagtttataagccttgtccacaagaataaaaaagatgtcagtaagtaactaggctaaaagtcttgcagtgtaaataccaaagttcctcaaagacgtagacaacaaaatttcaaaatatagcctgggttaatctagtatatatttcctgtgaaaatataactcttcattaagaaagcaaagcattaatctagaaagattcctgatacctggtggtttatataacattttagtgatacccttaagaacaatattttaaaaattatattaaaattataaatacctaatacactcaggtacttaataattgccaaccttaatttcatttctcttttccttctctgctttccataaaagcttaacattttcttctcatttatggtagtttggatgtcaaaagtccctaggctaccataaaactccctggtgcttagaattagagaccctgtaattaggcttaatatcacctgtaagaaaaaaaataataaataaaatttcttatctatgatgtctctgttaataccagagaatcactaaagtcaccttttagctatttctttactctcctctttctttgcaaggaggaggaacttttattttctccacgatgggcttggcagaagctaggagaaatatccacgatctactttgggcaccttcctattcatccacgactgttgttctccaatcaagtgtccttctacctcacctcctccgtgcttattccaatgctttaaggcacatgtggccagtcaatcaaatttccgcccagactctaattgcattgtgtgtcgaagaaaggcaactgacatgaaatacctttaaagcataatatcttcctatttattattaaactgcttttatgggcaggggtggggaggaaaatggaatctgtttgtcgggtagactactgcctcaagaatatgttcatcattttatagatctaggaatgtattacttccaattggcttcatggttaaaactgtgaatgtgaagtcaggccaacctgcattcaaatcctcaaagatctatcacctgcctcagtgtgacttactgctttgacctgtaaaatgagactaataactgtctgtacctcagagggttgctgtcaggattagccaagatcatgtatataaagggcttattgcagtgtgcctggcaactcattactgagtaacattactcagtaatgttagatggtattaacattgttgtggttgaaagacagtgcttaataagtggacagaaaatgccttggattatgatttcttagaatctgtgctaggtgtaacagaaagaattatgagagcaatttaagattattcaagattttcctctaaactttagcttcaaaaatcctagaggaaaactctgaccagtatgtaggaaagttctatattccatctcaagaaagattcaaacaagtaaaactcctgttgtgggccattgtatgtctgttcattgtcatattcctctgcttgaagaaacctgtagttagaaaacagttttccatttatgccattctttcctgagggtctcaagttttctagcatttatatacagagttagtttgtaaaaatacaataaaggtttaaatatttattatgacaaattgttttcatcctggttaataggcaatggtcctgtcagttgggtttgagtgtgggattcttaaaactcagatgtgcttacatgtgtgaggaaagcgagtctccaacggtgttcaggtctagatatgaccccattgcctttgtgtatgcagaactaggcagagcgccatgtttcctcttcaaataagcacttgcaacttatcatagaaagcagatagctttgcctgccaacactcccatggcagtcttaggtttcatttttaatttggttccctgcatcttctctactttagaaagaatgactggctcctatatatggggtcattctcagttttgagtgtgctccattttctgtggcgagagcactgagtcttgaacatgctaaatctgtatgtgaatgttttattatgctctctcctttttttcttacagagttgtctatctttgaatagtttctcatttactgcttagtttaaaagtcatttgcattgaattgcttgagatcacacatgaactagtttagcaaacagtttttgcaatctcatctctgccagagatttggttttaattgttaaggtagccagacatattttctgactcaagcattttaaagagaattctgctaagttttaaaatagaactgtacaccatctctttataacacaacagagtgtttgctatgcaataacaaatgagtagagtataatacttgtgaagtggtacaactgaattctgtccaagaaaactcctccatatggtccctccagctcgtaagtttggctgcaaccctgaagcattctcctggttactatggctgcttatacacttaagtcccatggagttaagaaaaaaatgcagtagagtgaaaattagctatatagcgtgttttaatagagagcacatgtgattcatcctgaatgtgttaagattatatagaaaatttgtaaattttacttgtggttttgtgggaggatgtaaggctcatagattgcatgttgacaaatgtaaaatgcttgcagtgaatcataaaaggcctaaatggtgcttttattgtatttcagggttttaagcaaacatatctgaaatcataatgaaagtcaaagggaaaagattatagcttaatgcatactttttaactttacacatagctggggatggcttgtgatgcataaagtaagatcagtctttactgaatttaccaattcttcatctgaagactccttaaattaagcctgtttgatttctcaactggatgctgaaagagaattaatgttatttcccaagccaaatcaaggtttgatgctccgaagcttccttcattcctttcccctttcagcattttctttcagtttgggccctttgcagtgccattgagaatggagcacgctaaacttttctctctttaaacacacaagatctcttcttgcttaaatggtaatgaataaattactttctgcagcctgacagaaagatgaattgtttaacacttattatgcaggcatctacttaaagcccagattacagttcaattcatatttgattcatagaacttgaagtattcatcctcccacccccatctccccttcaagaaggtcctgggacatcttcctgttgtaacaaacaagacatgactcacgcctcctcattcctgtctcctgccggggtctcagcagttaggcagccaggcagccagagacacgtgtgtgagaaataagacttaagttggatggatcaaatgcttctcaattccctggcccactgctgttcacacaacataaacacagtaatcatcttcatatgcgaaattagggagtggaaatgggctaccagccatctaatgcagaaatttgcggcatcaacagtgagccttatgttggggagagggagtggtgagcaggcaaatactcttccttgcaaaaagccctgctttttgaatgcatggaatgattgtgttgtcctctctgggtactgtgtagagggcagctggggctggagaacagaagagaattttctgttttaattggacaagagagaaatcttttacaaaacagaaccgtggtggtctagaaaatgcggctgtctgccttccggagagtgtcttgcccagcagagcctctttgcatccgtcagccctggcttcagagccagggcagtgcctggcattaggggatgatgggcatgattacctaacactggcatctttctcttttggaaactgcaaccaggctcctagaagcaagtctaataactagtgggcagatttcaggtggtttggaggagccccggctttagggatgtttggcagctggggaaggaacaagaggggctctcttttcactgcaggcctctggagccccaggcactatctctgcagaggtagaggcctgcatctagctagagtggagaaagcatactgtctcagtctgctcaggctgctatgacaaaataccataggttggtagcctaacaacagacatttatttctcacagttctagaagctgggaactccaagatcaaggtgctggcagatttggttcctggtgagggctctcttcctggcttgcatatggccaccttgtcactgtgtcctcacatggggaggggagagtgccagttctgatcacttcctcttattacaggacgcaaatcccatcatggagactgttttagtctattctcatgctgctaataaaaacatacccaagactgggtaatttataaaggaaagaggtttaatggactcacagttccacatggctggggaagcctcacaatcatggcagaagatgatggaagagcaaaggggagcaaagggatgtcttacatggcagcaggcaagagagcttgtgcaggggagctcctgtttataaaaccatcagatctcttgagacttattcactaccacgagaacaatatgggggaaaccacccttatgattcaattatctccacctggccccacccttgacatgtggggattattacaatgcaagatgacatttgggtggggacacagccaagtcatatcaaagtccctactctcatgaccacatctcaatctaattacctcccaagggtcccacctccaaataccatcacatagggtatagggcttcagtctttgaatttgagggacacagcccttcagtccatagcacacacacaccatcagtagttcttagagccctgtgtggcttctcagttctttgcctttgcatgggttgtttcctgagctgaaaataccatcatctatcttgctctcttggtaaacctatgttttaagattcagctttaggaatcttcaaagccctttccaatcttggctccccaggtgaagcataaagacctcagtggatgtctgccttggcacccaccaccctcttggtgatgacatgcaaagctcaggtgcctctgctccatcaggcaagtgatgtcaacttcctctcagtatctccagagcctggccctccagcagcaggcagaggttagctggataagtaagtgagggcagcaagcatgggattaacagctggaaaaagtggattcacgtatttgcagccaaacacctggcgtatagaaggccatatcgcctaggcttgtataagaacattgtatgatgctgacacagtgatgaaaatgcctaacaacagatttctcccgacgcaaccccttcattaagggacacatgtctacactacttactgcttggttctctgtcatattctagttatcagttttctgatttgtgaaatttaggtagttgtaattgttactttgcagggctattgaaagaatccagttaaacttctggggaagaagaactttgcaaatggtaacatttgatttaaatctatcggaaagcttttgggaaaatgcgcacatatacataaatactatgcatgtgtgcactcctcctttcttctacttatgggtcttgaagtcaaacagaattaatttggaagttgaactgcagtctcttccttagctatgtaatctttacttattaattttctcatttgtaagatcaataaaataaatataggattgttggtgaggatgaaataacaacatagtgaaattgcttagcacagcacctagaacataatggatagctacagatgctcttccttgaatcccacacacattccacggccaccagtgtggacacagtgcccctctgactgcctccccacactaacctgacacactcacgtccataccactcatgtgggcaaatgtgaaccacatgcatagtttgagattatcaattaccttttccctagctgtcagtcttatctccccacctagtgtgtaggtttccagagctgaggcaaaccccattctcacccagcaccaggctctgcccacagtgaacaccctcctgtaagtattagttagaggaacactcttatttgtagtgccttggcgtgggatttgggaattgcagagggaatgagtcctacttttatgtgtttgtttttgttttcactttaacttttattttaagttcaggggagcatgcgcagtacgtgcaggtttattacataggtaaatgtgtgccatggtggtttgctgcacggatcatcccatcacccagtattaagcccagcatccattagctattcttcctgatgctctccctccccccatcccctgctccagcaggcctcggtgagtcttaagttttaggcaacagtggtggcttccctgcagttcttccttaccttgctccattggaacagctcctccaaaccaagctccacccgctcctctgcaaacctgaacacggaggtgtaggaggagccttccccagctgtgtcctctcatttcccatagagggtttctcactcatatacagacatgaaacctccctttgtaacagaaatactctgtgtgagagctcagggaatcctggacggtcagttttgcttttataaaagacctaaatcagattaacttggtaaaaacttaaaggtccctttccttgtgccccagaaataggtgcaacactggcctccctcacacatctccacccaaaaggtctcccaggacttggtttggggtttctaccaccagcgagagcaggactggtgtttgagcaaaggaaaggcatcaacacatagtctgacaatgatttttttcctcaactagtgaattgatacctttctacgaagagtcttgctagggtataaatatcaaatcccatatgttacacattacaaaggaaataaatacatgagcagaaatacagtttcagcttcatgtgtctgtgtatgcatcaggtaacttagtatttaaacattttcattcaagacaattctggaatatttaagccaccaactgttgtaaacatgctttacaaatagacgtttgaagaaagacttctatattataaaatttctaaaatttttatttcaaatattgttctgttataaaggtagtataagcccattatagaaatgttgaaatatagactaagaaattccttttcttttcacaaccttaaaaaagcgatagcatttggttgtttttcttctaaactctagatgaattttatatcattacagttaagaacacagtgtctagacacaggctgtcttgggtttaaattcagactctattacttaccagctgtgcagtttagggaaagtcacttactctctctgtgcttctacccccatcatctagaaaatggagatgtgaatagtacctaccacataggattgttgtaagaattaagagttcatgtaaagtattaaagtgagctatcattttatttcacataatcattatcatcctgtccatgtgttttatgtcattttcatttaatgttttatcataattcttttccacatttgacacagtttcttctagtggtgatttttcacggttgcaaaacattttatcagattataatttaactgtttctctattattggacatttatgttatttctaggcatttctattttaagtaacactgctataaataccatcatgaagatcattttttcatagtttacattatttccttaggctagattcccagaagtggagtgccagggtcaaagttgataacattgcccatgatacaccttgccaatggctttccaagaaccttgaatcaatttatatttccaccacaaagtagatgtgtgcttcaactgagttctgttgctttttaatcagcaaatttaatggttaaaaaattgttcattcacaataaacattgttaggaacctcctaggtgccagggaccgcgtctcacattggggttgccaagatggaggtcattggttctgccacgttctagaggaagaaactggaaaccaaatgaacaattctaatcagtgtgattagagcagtgaggtgcaggggaccctcacctactttgggaagtcaggaaggcttcctggaaggggcagacttgagtttagtattgaatgaagaatggtagttaaccaggtagaaaagggatggagggttgttccatacaaagggaagagcatgtgcagaggaggggtgagggggctggcccaactgtggaacttcaaggaactgggtattggtgtgttggaaggaggattgagagatgcagctggcaccaggtcatacagagaagctgggttctgtgtaaagttatgatttttcaaagctgcttaatatggttttgctgtgtccccacccaaatctcaacttaaattgtatctcccagaattcccatatgttgtgggagggacccagagggaggtaagtgaatcatggggactggtctttcccgtgctattctcgtgatagtgaataagtctcaggagatctgatggatttagggctttccacttttgcttctttcttattttctcttgccgctgccatgtaagaagtgccttttgcctcccattatgattctgaggcctcacgagccatgtggaactgtaagtccaattaaacctctttttcttcccagtctcggatatgtctttattagcagcgtgaaaacaggctaatacactgctttttatttgttggttggttgattggtaagttttaataataaaagcagcctcagaagaaccctgcaagagaatttctgatgatatacgatcagatttaccaactggctcacagtattaactgttaaattaatttagcggtatgggtgttcactaaaccaagctaacctgtaaactagcagcattggtgcttcactaaatgaggttagcctgtactgtggctcatctggcagcatagtgaggtgggcaaagatggtcttcaaagtctcccacccaccccacctcatcccttttttgtttttctgcttcttcttattcccaccagaggcttggagacctgccctgcccttcccagtccctctctaaataacctctcaacaccctggaaaaggatggttgagacaaactcattcgcacaatgatgctggcgattggttaagaggtccagccctcacctctccagaagcaattgaattcttgagggggtcacctggaggatagatattctttcaacccaaagagtctccagtagtggaatttcagatcagaaggccagcaagtaaagaagctatttaagatcaagttgggcaacagtgccttcttggccccttccagggtcccacatgatgagacgtctttgtgcaatcccagatctgaatgtcaccttttgtcccactgtccagggtcagcttcagccctaggattgcctccttcatcttgccttctacatggagtgtgaaatcagtgtcctgggataaactgtgcctgaccatcagcttttcctaaaagctggtcagactcaggacaatggccagaggctgggaggatgagggcttcagtgaagtggccacaattccatcatttcaaggttgcctacttttctagccctgatttagaaaggaagaaaacagatatcttttctacctttgcaatagcaaaaccacaacaacaaaaaaagcgatgaacaattcatctaagacagtgttgttttttttttctcacctcagaaaaacattgtaattccttctcagcagatttcctagatcttaaatatcagctcaaacatttatgcatgaaaaattagaggccatgaatgatgcatgtattctggaaagtctgcctgtgaatctctccccctcctttggaaagtcccaggatggcagccaaagcctcatttccaacccctatttcaaagccacctgagatgaaatttcctatttgtttccaactcactcaccctttgcatattcaactctccctggaggcagataagtctgctattatcttgtctgagatgttgttcttttacttgaccagatgatagcacaattgtcagtttgctctttaataatactacttcacaggggatttgtaaagattaatgaaattatgtttgaaaaccactttgaatttgtatgcgttctttctcccgaggcgcggggttattatttcttagtgtttatactgtatcgcccatgtaagaagttttaaatactctgctaacatttagaacggtttaagttagatgtgaagccattggctattagagctggaaggggtcctaccctcaaactgaggaggtgaagagaagtctgccgcctggagtacagggctgatttacgtagtgccatgcagctgctgaatggcagagccgggtctagaatccagggccccgactccgtgttcgcatcttcagctccgttataggttaaattgtgcccacccaccacccccccaccccgcaaaaaaaaagagaaaagtatatgttgaggtcctcacccccagtacctcataatatgctcttatttgaaaatagggttgttgccaatgaaattagttaagatgtggtcctactggaggaaggtagatccttataagaggtggaaatttggacacaggcacacacagaaagaacaccgtgtgaacgtgagggaagccatctgtaaaccagggagaagggcctggaatggatccttccctcacagccctctgaaggaaccaccaccttgattttggacttccagcatccagaactgccaggcaacaccgttgtgttgtttaagcccacccagtgaatgggatttccttacagtagccctaacaaactcatacaaagtttttcctacttttaatactaattattgccacttagcagattaagagattgaggcattacgaaaggggtcattggtccaaggctggaacgtctactggagagccaagtaatgaacccagaaacctgagctgcttttcttcactctccctaggcatccctcggggctgctagagttgggcagccctagctcgatgcccctcactgtgggtatgggcacctgatgcagcccataatgacatcccagtgccccaggggctgcctcctggcaccgctccatccttcccattgtcagaaggcagcagcagggctgagtgcgggcagcagaccagggacccttgtcatgtattgtttgacaacccaggaggggttttaaatataaatgggtggagatagcttctgagggtctctttgtcaaggaggcattggatacacagaatccattttcctgggacacagcatacgatccatcggggctaagttctcagtcctgtccacaaagcccgtgtaagtcagggtgttccagaagctgagggccggcagtgctgcttgctatttgggaagtcgtcagtgacactgaagaggccctttcaatggtgttgtcagggagagcagagagaaggaaggcaacaccctcagctctggcacccacagaaaaggggagaagggagaggagagctcgatctgagggctcacacgctcaaagaacaggtattggtggtttattttccacactggagaaacttgagtacatttggaaatcaggaaaggagccagctccgtgaaagcaccaatgatacccaaggaggcctagagaggttaaggcacatctcaaggccatactggaagtgagaaatagagcaaagactcttgcttgccagtccagggctctccactgtgcaaagatcatcccaacttccacccattgtttccaatgtcacagatcacccttgtgatcagttacttggtactattgcaagtcagctagctaaacttaaatatttaacctcatctaaagcaataacatccacaaaattatgggtttcttgtgttatataatcattttcttaatacttatttaattaaataaatacacaactatttttcaagtgttttttttttttatttattttttatttattttttgagacgcagtctcgctttgtcgcccaggctgtagtgcagtggcgcaatctcagctcactgcaacctccgcctcccaggttcaagggattcttttgcctcagcctcccaagtagctgggattacaggcgtgcgccaccacccccagctaatttttgtatttttagtagagatggggtttcagcatattggccaggctggtcttgaactcctgacctggtaatccacctgccttggcctcccaaagtgctaggattacaggcatgagccaccgcacctggccaagtgtttttattttttattggttttgcatatcacgggtagtagccacctagtctgtagcgtgggcagctttgcaccaggggttagggaggagagaatcagagtcagggacagtggcttagaatcctaaaaatgggggtgtggacatgttgggagcacagggaggggaccctctccccaccagtataagggcaagtaggttcagggacagagtgacattgaaatggaggtgaaagaagatgacagcactcctgcccactcaccttaatttgtcaacaaaaaaaaaaaaatgacaaactgatgacaacttgaaggtagcaccgagttttagatcttaaattaaaattgtattatagtcatctgacactcaaccatttttgccacaaagcagaggtcagttgtttcaggaaaaaaagttggactttgaacctcaactctggtacttaaatcacaactataattgcatctggattggatttggaggttgacctttgatcagaaacattggtttcctaagatgaggcctctccctgacaaaaggctggtttgattgcttggaactggagtgaatgttggtcagcacctaagagcagcttctaaaggtctggcttgacccctccttggcagctcaacacattgatcctaaggaaagctacggagggatgtgccaggcagaccctgtgctaggcagaacccaaagtacctgcctggagtcatcgtgcaagggcaggtctcccagcccaacggtggtgctagaagagtcatcacaggactatgggtgtgctgccttcccaaccaggaactaggtagaaaatttcactgtctgttgatccctgggagagaggaaagatgatggcaatagtcacatgcacatactgttagagaagttattctgacacttgttagaatggcgaggaagacttcattcaagactgttacaatggggccactgcagtaggggagatagtagggaagatagtgctcccgatacagcaaggacaagtggggtttcatagctatgaagcagatgagtgggtcaagggaaggggggtttcttgctaaactggcttagcaggattgttactaaaactgagctgacaggacaggggccaaagtcaggaggaaggctcagaggagcctgagacagtctttgtcagcactgggtgctcactaggtgctagtcactggactatatgctctgaaatgcagttatcacaccatcccctgaagtaggaaggcttatttcaatgtgatagaagaggaaactaaggtttgccccttgtcgagggcctacagatgatcagatgggagatgtggatttgatttcagggtcctctgatcgtcatgcacaaagctttcccaccactaaatgattcctgatgctttgtgaggagctctccttccttcagagatgtttgtaaaagagcagaggcttctgtgtccagaatggtcaacacagacaagaagtggggggctgtgtggtgtaatttcctcatagctttgacatctaaaagaccatcaggatggctaaatagtagaaaggagagctttattgatgatatcagtttgcaaaccaagaagagacagtttccagcatggacctaaggtgctttcttttcaaagaggggaagggtgggctgtgttttatgcctcagaaggtctgtgtcacatagtagatattcaccaggtgaatatcactgtacatattcaccaggtgtggaggaaggccatacaaatttatgaggtgggtcaagcacatgcacaatggaccaacacataggtaacaaacatcccatgttcactttggggcagggctttagcattaaaatgaggtagaatttggctctttagggcaaaaggtgaatgacagggcacagtttgcctacagtttctatgagctgctggaactggcttaagggctacagatgcttatcaggaaagagtgtttataaggccagtcctctgtctattcagagttgtagtggtctgggttgtaagacagagttaggaggagtctgatattttgcctgatggctcctactgttagaaagtttaggaagggtgtgatttttctcttaactgtaagaatttcagaggttgccatgctcactgagtccagagccctcgccaatagataatcttttccccttaacctttgtgtctgtcttagttcatcagggggcgtctgttttggtctctcagattacaaattcttcagacgccttgattctcaaattgtaaatcttccttcctcttgccactgtgagctctaagcaagttcaaaacctgagcctacatttaattcctagatagggaatttgagggtttgttttagcaaacacgtctggtggctctgcccttttcctcccctctctttattcactgctgataatccctccccatctttccaggctgtccttcccttaatcctgccagtagaaaccctgactatcttcaaatcccaactcacaggccacctctttcccgaaagctcctgggggttccaagcaggagctccctctcctgtgtcctttctaatgcccagagagctgtggccatactctgtctcgtgacataatatgcctggctgtgactccgtgaggtccgctgtagagatgtcggcctcaccagagcagggtctgggtctccccatccctgacttaataaaatggctttgagtagaaatcatttaggtgggaggggcccaggccctggcctctgcagaggagatgcagccaaacactaaatgagattcagagctactgaaaggcctgagggttccgaggtgtctacctcatcctcctcaatattagctaatttgacttcctggggtgaagtgcaaaaggtattccttgcagctcaagcactatttgaagcctcctattaaaataaactgccttggagggcacattaaaactgcagagaatccttcattagacctactgatatcagcaaaagtgctgagtacctactgtgtgccatggtgacgtgagattagaagaaaagtgcaaagatgaataagacccaatccctgctatgaaggatcctcccagtcaaggattgtggggtcagtagtgggcacagggcaaatagtattgataacaacagtaactataaactataagaagagctctgataataacgctaaatgtattgaagcacttactatgagttcgacactatctcgaagcacttaacagaataaatgcgttagtgctataagccaatgagctaggcattattgctatcctcattttttaacaagggaaccacagcacagacaggttaaaccatttgcccaaagtaaacaattagagaaaggtggagctggaatgtgactccagacagtctggtgccagagctttgcactagaagaacagaagaaagaggggttagctttaccctaggacaagagtcaggggtgcgggggctgtccagtgaaaatttcacaaaggaggtggcatgatatctggaagagtaaatatcatgtaaccaagtaggaaggaggagaagagggaacagcatccttaaagtcacaagcaagagcatagatactccaggtcttgttaaagaaaagcattggctgggtgcggtggctcaagcctgcaggcccagtacttcgggaggttggggcaggtggattgcttgagttcaggagttcaagaccagcctgggcaacatagcaagactctgtctcttaaaaaatgaataaataaaacttaaaaaaattatccatgatacttgttaaagaactgtaaggcagagtttattccggatgactgcaacagaggtttcaccatacgggctggagaatgtgctcaactcagaatccaacaagaaaaagtgggaattgatagccaaaaaccaggggagggggaagttgtctgtgtatagaaaattactaagaagaaacatcagggatggggggattctggccaaactgacccaacaggagccatgcaggccagggtaatcagacatgacctgggggatggtgaaggatgggaaattcaatcagatatgaagagtaggggattctggctaaattgacgtgacaggattcttgctgaaattgggctcgtggaggccctgcccaagcatggggcttagtggggctcagatgagcctgattaatgtttggtcacagacagaattcttgtcggtctccagatcatttggagtggatggaacatgctgtcagtctacagagaggggaatcttagagcaaggagctaggctcagcaagcctgggagggcaggggctggaaagtagagtgaaaggaactaaccgcagagcctttcacagggcctaccatggttctaggcactggaaataggtgaaactttcagtagtgatgtgaggattattctacctgttgagcaaactggactttcgagaggcgacatgatccagagctggcaagtggcagagctgggattggaagccaggtcccactgatgccagcgccactggaactagctgtaggagttgatactaagggttcgggaggcaggcagccctcgtcagcaggcatccgaggacccgagagaagcagggccatggtctagggaaaggagcctggggaacggtagggggaggtgaactctgccccagctcctcctcactttctctgagtcctgatgcccccggtgagtctcctgtcacacaaggctgtctggacaggatcagtgctgattggaagcaggatgagagacgatggcttgggtaggaaacactggctcctgtttcattgcccattagtccctgagctgtagaaccccccctttttcctgacttgctgggagtggatctgtctctacttagccagagggaaaagcaagaccagctgaatctgcaaagctaagtaacctggttaccacagggcaggagaaaatcaatcttgataatcacatctggcagtatgtaaagccattttgttcagacagtacaaattcgttttatggtataaaatgctgtgtatttattgtgaagaaacactgaactcatcagtgctctacctagtgtttaagatttccattccatggagaacaaggtttcactttcttcatgaaagagatatagatgtgtgaagtgcttgtgtacctgtgtgacatacgccctggctaaagactgcatgtcagctgaggtccgcaacaaggaagaacagtgcccaagccattgaactgtgtttctattgatacttgtgtttccaaagctgattttttaaaggaagggcttatgccttggaaggaagagtcaacatctgaaaatgttagctaatttaatttcccgaagagaaatgcaaaagggattgaggtagtttattatgttaaatctcaaataaacctggacaattaaaaatggaaggaaagccaagactaattaaaaggagaagagaatgagaaatgccagtcatctgggataaattgattattgcagttgagcactaaatttagctctcggcttctttgtggctcaggcattcgaaaaataatttgggataataaagttttttaggtttatttacagaaagctaccaatgaccacaatcatgacagaacacttatgagtaaacaattagtttggggattgaaatgtaaataggactagaattcatgaatttgttctcaacatttttcctctctgacaaaactcatgtttgatattgtgcctttgcttttgtactcagaccccccgtggtgtgtgtatgcctggagtgagaggaggtcatggttcctactttattttttgttttgattcctttcttcccaaactgttctggaattgttctgaaggtgttatgtagtctggaactctaaaattccgaaggtactacagcaagacaggagggaagacagcatcactgactccctgcaggatgggcacagctgcctctttctgtcacctcttcactgacattaacagtccagcacttaataaacatcctgaagctcccattttcccatccccactcccagcacccccttcatgagctaaactacctggagatgttgccatcacagactcctcaacaggagggcgatcgttcagggctaggggccaggtgaaaagagagagaagtttcagtaagttttgggggaattcgggagcattgattggaaagtgaatgacctcaagggagaactctcttctgggtaggacggttcctccttagctgagcattagttgacctcatgatcactttggaaacagagagaaattgtccatgtttgaagtagaatttctacatttatcttcagcatggaaccctgaaacgtagaaataactccagggatgattgaaaccaaggaagcagagtaaaatgcaacctaccagggactttaataatcacccagataaagactttaaaaacaacacacacagctaaaagcacaggaggggaagacgtgcaaattatatttagaaaggcttaattttttaaactttttcattttcaaaatcagagatgctattagcacactactgagatggcaactgcaaaggtatctgtctcagaagcacaaaggcattgaacaggccattaacattgaaggcagtgggagggggaagggaggaagcctgggttctgttgcacaccctggtgtcaagtcccaagtcggccacttccaggccctgagctggtgagcgagtcaccctgtctggatctgttcctataaggtgttcctggcattgataccgtagagaaagaacctgtttgtctgtctctttgtttatttattgtattagtctgttttcacactgctgtatataaagaactacccgagactggtaatttacgaagaaaaagggtatatttgactcacagctctgcaggcttcacaggaagcatgactgccagacctcaggaaacttacaatcatggtggatacaaaggggaagcaaacacctgtggcaggagacagagagatagagcgaagggggaagtgccacacaccttcaaacaaccagatctcctgagagttcactcactatcacaagaacagcaagggggaaggaagcccatgcccacgatccaatcacctcccactaggcccctccccctaactgtggggattacatttcaagatgagatttgggtggggacacagagccaagccatatcatttatttatataacctcctctttccttaaggtaagagttcagatggttgacataaccatttcatgtaactgttaacagcaaacaaacaagcacacggaaagccagggatttaaaactctacctatctcacagggttgtagtgagaattatatgtactgtttatgaaagtgtttactttttgatgggcacatagtagatagtaaatgtttgctgagtctgaaaatatgctcctaccagcctaaggagctgatgcactgtcggttctgcccacttaccttaaggagagccagagaaagttcttctctgtagcctcctttccctttgtgctgtcccacaccatccacccaaataatgcctatcactctggccaagatgctgtctgtggctgttcccctgcagcccagccatccctggtgacttcagcatggaacccccaaatcacatttgattcccaggggtatcacatttggtctgatgggcaacattcccatgcctgtccctctcccacactcttttggtgttagtgacctaggtcacattagagaaacttctgttctacttttggagccaaagtctgagaagtaggcaacaaaggggatctgggagaatcaattaatgatcccagacacctctcatacatttttcagtggggtcctagaggaagtacagtgtcagcaactccaggctgatttcagcataagtgaaatgtattcaagtgacaaaactcacaagcagaactaggacatgatcttatccggagtcatttttttaattattgttgagaagcagaatctagttacagagaaatgatttgatgcggatgcccagactctagctgtaaaatgagatacagagtaacatttgtccagtgaccttttcctttcacaggacaattaatagatcttatttttgtagagctatgatcttgtcagtttaaatccaacttgctgaccaaactggagagaaacctttgtctccaacagaccaagttctcctatctgccgctgcttggaatcgagtttgctggctggtgtgagtggaatttcagatttatcaggccagccgtggagcagaaataataaacatgggattcgaatgaaaggaaagcagaaagtagaactcatttaagacgaatgaaaccctttaaatgaaagtgcatctttctcaataatagaaattctaatgttcttggagccattattataatagctttctctggagtatgcaatacattaaggagtccaagtcagagcaaaggacaagcagccgggaatcatttgtccactgagccaacagcaagtcatcagccatccatatgccttggtttccccatccatacgctggtaatggcaactgtcgcttggtactcctgttgcagcatgtgaaataacaaagatttacaaacatctgtttgctttaatagccaacaaagttatgctggtacttatatccaacatgaatggactaaatgctcttttctgggttcacaggcctactggaagacctgataattaagtgaacgatgagatttactcaaaataggtgtcaaggacaaaaccagggccaatgtgtggaagctttagggaggttggttttatctcaacctaaggaaaattgtatgagagtaaatctaggccaggtgcagtggctcatgctcataatcccagcacttggtgggactgcattgggaaggtcacttgaggccaggagttcaagaccagcctgggcaacacagtgagatctcatccctacaaaagattaaaactagccaagtgtggtggcttgtgcctgtagtcccagctactcaggaggctgaggtgggagaattgcttgagcccagaagttcaaagctatagtgagctgttattgtgctattgcacttcaacctgggtgacagagcaagaccctgtatctgaaaaaaaaaaaaaaatgtaaatatgttctgttgataaaaagcaccaagtgaaggtgactcacatgtcacagatgtttcagggatcactgcattggtgcaacatggtgagacaatatgccatttgagatcccatccaaatctaatattctggattctaaaattttattaattttggatgtgtagatgagtgagagaagacctctaaacaaaagctcttaatatttctcttctgtgggccaccaggattgggtagagttgtcacagagcccctgcctctcccgacttgctatcacataatgaaatcttctcagcatggaagggcaggcttgcaacactttggaatgggcaccagagagagtggacaaaagaaaaaaaaccacacacaaaaaaacaactattcacccagataaggcacaggcattaaaaactggaaatagtctgggcatggtggctcacacctgtaatcccagcactctgggaggccgaggcaggcagattgtttgaggccaggagttcaagaccaggctggccaatatggtgaaactctatctctactaaaaatacaaaacttagccaggcatggtggtgtgtgcctgtcatctcagctacttgagaggctgaggcacaagaatcactggaacccagcaggtggaggttgcagtgagccaagatcatgccactgcacccagcctgaatgacagagcaagactctgtctcaaaacaaaacaaaacaaaactggaaatggaattatgagagaccagccagtaggtactgggacacctcacaaaccacccaagatacccagctcttaacagtcatactgtggagagctgagaaagttgccttaaatgtgaagggtaaatttctttcctgctgcagaagtcctctgtctaagatttatgcctcaggagggaatggtggctatttaaggacaaacatcttcttggtcacaactggtcattaggacggtggaaacattatgatagaaagagcctggtctagaggtcaaggagcaagcatcgtccattcaaagtcagtcttcactgaaaatctccatgacagcagaaatggcgcctatgtccacacggttcattacagtgcctggaacttaggagagactcaacaaatgaccaggtgtctgatgtcagctctgccactaacaagccatgtgatttaggacaagaagacacaatcttagatccatcagctatgaaatcatgatgaactctagaaccctatgtcagacaactcacacctctgttcatccatcctaaaatatttgctgagtgtctactatgtgtcttgcaggactgtaggccctggaattgcagccaagaacaaaatattccctgccttcatgaagcatatgttctagtgagggaagacagacagctaacaaatataagcagatgtagagaatatatcaaatggtaataggtggtaggaagaaaagaaagcatggcaagggagcactgggaggcaggtgtggcatgcgggtgttctttatacatatatttatagagagttgtcagagagaacctcactaatgtgatatttgagcagaaacatgaaagaagtaagccacatggatttctggggagagagcattccagacaaagcaatagaaatgtggtttacctgtgtaacaaacttgcacacatacccctaaacttaaaataaaagcctttgtaaaaaagagatgcaatcacgattatgttggcaaattgctgtaattatttttataagacttactacaggtgaaggtctactgagattgaaaaaaaaaagaaagaaatgtgggagttgctagcaggtgcttggtattaaagccacgagacaggatgagatgaccagagaaagtgtaggtaagaaaaaaatcattccaagaaggctttgaggcatccaacagtcataggtcaaggaggtgagaggaacccgtacagtggctgagagggaggtagaaggagaactgagagagtggggtcccagaagccaagagaagagatgcttggaagaggaaggtcattttctgtgtagaatgctgcagatattttgactgcagcagaagctgagccttgactattggttttagctatctggaggtcataatgaccttgacaagagccatttcgggggagtggtgagggagaaagcctgactagagtgggttcaagagaggatgggaaggagattggaggaaatgtatattgacagtgctttagaggagttctattgcaaatgtcagcagaaatgggtgggaggtagctggataggaatgtgattttcttaaagtaaaagatgctctatttctatgcttagagagatgatccagtaaggagagaaagtatgatgacattggagggaaaatcctctgcccgctgcagttctccccacttctgttattaccacgcccgtcaaggaggaaagcactactcgcctctcctaccctggcttaaggggaaaccacagccctccctcagatatcatcagcaaaactgtcactaaacttgaaaatctaagtaaggcctgtctacaggcttagaaaaaacaatagaaaatcaattcaaagaacagtaataagcaacaagattggtgtttcactgcctgtgctccccatgctctgtggaatgctgataggtcaggtgagtttaaggactgctgagttaaaaaaaggaaagcagatgcatggctgcaagacttcttggaggctttaaaggctggtgagcactgtgtatttctaagaggggcaactagtgtgaggatttttcccaccacatttggggaagtatgacaggggactagtgttgcaaggcatacaatacaggaaagagtgaacaagatcaggggttggcagacttttctgtagagtcagatacaaatatcttagattttgtgagccattgtctctgttgcaactactgaagcctgccattctagcacaaaaacaaccatagacaataggtgaacagatgggcatggctttgtttcaataaaactttatttacaaaaacaggcaatgggccagattaggcctgaaagccatagtagtttgccaaccattgaaccagataatctgcctgaagagatgagctcatcttcctgcagagacacccaggtctgtccacagggatgccaagttcctacttacctctctttggcaggggctatttttctttacctttcacttaggagcactctcaaatacgcttaaattctttgcaatttagcacaaaggtctgagacctagaatggcccatgtagatcccatttcttttctggggccctgcccttttcctcatgattcacaccagaggtatccagcttctttgccatttttataaaactgtttgggtccaaactgaaaataactctgaatcatccagattgtggcttatccagtaggccttttgcttaagtgtacctcctcatttcctgatttctgtgagggagacaggggaggggaaatgaagtgaatgcctgccatgttggctgcttattgtccctgttgaaagcttttgtgaaaaaatgagtcttggaaccatagcacatgaagagtgattagaaaatatttgcctattggatctgaataaaagagcacttgtgaggttatggggaggtggcagtgggggtgggaggtggaaggatggtagtggggctttttcatggaaaggaaatgaagatttttttctttgggacccaagggatggaaccaagaccatcaggttgaacttacagggagcaaatttcagctgataagcaggagtcactttgattttgtcagaggggtggggaggcagcattccatgtgagccttcaggtagaggctacagaaggaacactcacaattcagatgtgccagtaagctggtgccttcactgggtctgctccaaccaagtatcatatactgggtggcttaaacaacatacattgatttctcatagttctggaggcaaagacattcaagatcagggtgctcacatggccggtttctggtgagggccttcttcctggctcgtagacggccaccttcttgccaggtgatcacgtggaagaaagagacaaagctctggtctccctttgtcttcttataaaaacactaatcccattatgagggccccacctttcgtgacttcatctaagtcatctatctcccaaaggccccgcctccaaatgctatcacactgggggttagaatttcaacctatgaattttgaacatttagtctatagcagtgggataactttttaaggcccctttcaatcctggtcatttatgacaggcctccacaaccccaaggccatggaccgatactggttcctgttaggaatcgggccgcagcagcaggaggtgagtagcgagcaaggaagcgttaccacctgagctccacctcctgtcagatcagtggtggcattaaattctcatagaagcgtgaaccctatcgtgcaccgcacattcaggggatttagttgcacactccttatgagaacgtaatcgctacccacccccctgtccgtggaaaaactgtcttccacgaaaccggttcctgatgccaaaaaggtaggggactactgacttttgaaactgaagtaatccactcaagcatggttttctttagactgtagattattgctttcacatagtgtcctactattgcgctggcccccactgtcattaaatatcacctatatttattggctggagtgaaatatgtcagaatatcccaacaggaatgattgaagagaggattcaccaacttttaagagacaagagttaacaccaatgccacctttgtatagctctggtttgagcagggtgagctgaaacaaggcactctaatccagagacaactgtctgcataggcttgtggctttgttcctgtgtcagagatgtgagcagaacaaagcaagatctgaaagagcaatgtggtgccagaacatgaaactcctagggttgttgcattttataatggaatggaaaccaaactcaactttggcacaaacaggacacatcagacctcttttcccttttatcttttaaatgtcttttctcagggaggtgttcaaagtggcttttaacaaagcatcttttatcccatgtcctcaggatatttacctatcccagatacctagaaaacctgctgaggggaccaggttagattctgggccatgagttttgctgtctttgttgccagtttggagaaattcaataagtaaaaactctgcaggagtttgaaagatctgagtgtaatccctgacacatgtgtgaacttcagcatggcccttctctgcttcttttttctgttgtaactactcgactctgccattgtaacacgaaagggccatagaccatacgtaaatgaatgaacatgcctgtcatccaacaaaaccttacttatgaacaccgaaatttgaatttcacgtaatcctcacgtcataaaatattctctttttgatttctttccaacagttaaaaactgtaaaaaaaaaaaaaaaaaacttctctattctcagctcttgagttatacaaaaataggtagtgggccagatttgatctacagattgtaatttgcccaccctgtgctagaccctgagtatacagaggtgaccacatttaacttgatcctagccttgtggtacttacttatgggagaagtggatactaaataatttgaagagtttttcatgtaatcaccaattgcataggaaggaaaaaaaagggtctcattaggaatcattacaggaaaacatcgtttaaattggagaattggcaagtcaagtgggtgcaaagatttaaggatttagccaggaaagagtggatagaaaaggaagtatcccaggcatagggggaatcataagctcaaactgataaactgagggatggtttctatccttcatcactgacctaccagtgcttcaggatgtttccagagagactgaatggtgctgagcttgctgggccaagtgtgagggatgaactggtaaaccaaaaacaaaattctgagccacccaaccgactgaatgcacccctccccttggccaagggggcttccaaggaagcctaaaaaaaactagttcagaccatgatgggaaggagggggtcagtcatgcctcatgatactctccttcctttggaatgcaggcacaactaactggcattaacatgaaaacagagacctgaaggctgacaaaacagactctttgtagtaataagatactaacttccagcctgactctagtgtagcatcacatgacagagagcaggccctgaaagaaatccaagtattttaccccaaaatatatttctgtgacatattttgaaatggacctgcagagctgtctcttgtgggggaaatttacatttggtagagaatccccttccctgtctacgtatttttctgatcctgacaagattagctgaaactcaggtaccttttaaaggtctgaataggaaacatttgcgatctattgcttctatgagtggccacctatgagacttcatcttcataataagaaccttggtctctgtaaccccttatcttaacccagacgtgcctttctattgattccaagtctttggataataaataacttaactctgtcgacaaattgccaatcagaaaatctttgaatctacctctgacctgcaagcccccacttcaagttgtcctgcctttccagacagaatcaatgtatatcttacgtgtattgattgatgtcttatgtccccttaatatgtatgccaactaagctgtagccaaccaccttgggcacatgttctcaggatctcctgaggctgtgtcacaggtcatggtcttcacatctggctcggaatacagtttcaaatatttttatagaacttggctttttcatcaacaaactcacctccaaatgtggtagcctctattgtccagctatagtccttccaccttctttagcatcattatgtatttttgcagaggttcaggactctttaacctgatctttgtcattgttgtacctcccctgagggaggcaggtgaggggtggtgacattatcaagcaaacaggaccctctgtgtctggtagtcaggcattgtggtttccagatcttgttctaccaccaccttgttaggtaatgctagacacatcacttaatccttgctaaactggaaaattaagagattttatatattaagagtctccaagcaggtggcctggtgggactccaagcctctttaaccagatcagccctactcatgtctgtcttatatattaaagagttcattcaaaataggatttcataaaaagctcactggacttgatggtttttgggtcctccccaggcctgaccctgctgggattctatgagcagaatctcttctccaagcctgtccatgttggatcctgaatatgtctggggcctccctggggcaaatgagccataagagtgaccatccaagcttgttctgtgagaataaggacaagtcaagccattttccccaggaaaatgataaatcccatcctgctggcaaaatatcaagaaaaaaacaaaaatatatgattcatatcgagtttgctcagctttccgttgcctcagtagtgccacaggcaattagtaatataaactaggtgttagccttttaacctcccagtaaatctgcatccaacccttgaggcactcacaccctcaggacactgagctggtagagttcctgtcccccgcccccaccttcaggtgtcctcagaggcatgcctggggctctctatctctgtccagcttgaacatgcttctctcagagtttctatctcccctaatccagataggccaatgagcttcggcctctgagtctggtaaggggcatcctgacaatgaatgccaggacgaggtctggaccctctgctgaatctgcccaggtgctgtttctgagttgcttgaacccggcatcactcctctggatacacgctgtacccatttgcatgactttcctgcctgcttttgttttttcagagaactcttcccacggctcacttcactctatggaacactcagagaagctgagtgagcaccataattctgccctgtcctctctgggtggccatgacactgaagaaaaaatccactggtactcttgatgcttccaccaagattaatggagccgttagtatccaggccacagtgtgcacctgcttccctttgttacagccccggcccctcccctggaatcatgccacagctcacaaagtcttccattcatatccttgcatttgatactcaagataaccctaatactttaggataggcagaggacacatgattatcccctgtgaacacatggggaaaccgaggcaccagaatcaagtcattaaataggactggagctagaactcgtgcccaatgtcttgataagtattaaattaatatttgtaaagtattagaacctgtctaggggcttgctgcaacactaggctcctgctctcttgccccttcactccctgatatttctgtattgctttcagaggccatttgccaagctgtgaattggctagtttgaaacttcttctagaatgggaatcagagagcaaatttctctgcatgtaggcagagctgtgtgaaaatgcagttctggttatttggacttccagaaaggaatcataaaatagactaccaacccaattctgaaacctttaacccagtgtagttggtgacccagcagtcctcacctttccacctaggtgggtgtccctctgagctgggctgttaagaaatttgctgctaacccccagtagaaatactgagccctttcatggtcctccaagttaagctgcctatttccagaaatacggcctgggttccttcctactcctccacccaccaaccaacaccatacctcttctactgtttatgccccaactcttaacgtgtccccagactgtccttttgaatcatctcaacctatctttggctcccacaaagttcaatctggcctgaatcctctgagctctcagggccacccccaccatgcaatcgacactgtacacaaacagtcctgagcacgtgagcagcccccacgatatcagcctgaaacacttgcattgcccatctcccagcaggcttaggatctgtttctctcatttgcttcttctccaatgccaggagctacttctttaacctcagcattttgtttcccacataaactatgatttaatgtcttcctctacttcttcagccttcatttccaaaatttctatgtgttttctctttgataaccacctcctctcattccataatcacctattcttttccatggatgttattacgtcctttatctctttgagtaaagatacttgtttaagagccaatttaatgttactctatcagctctgtttccccatgtgacttctgtttgttgtctgccttttgtggtgttactctcccacaggcttgagaatttttggtttatgagctcatcttctgccagaagccaccattctgaatgttctgggtggtatcccaggaaaaacagtcttggggggtcttagccctagacttgaggggaagtggttcccattcaggcttgtgctggccactggtctgccccacgtgtggatgggtgatgtggatctgagctctgtcctcaccggagtgagctctgggcccttgtgtcacgtgagtagcaatttcctcacctcgccatgggtaatcacatcacccccaatcttagggagatggtaggggtgggaaccacacagcttagcttttcaacaccagtgagcatggtgacccagcccccagcctcatgagggtggtcttgtccttactacaggcaaagagcattggcgtattgcccatttgatgttccttttgttttcatgttttagggtttaaggaatccccattttggtctcatgagatgtctctttcttgctttcaagtatggatatatatctattaactctttttacacttaaatagttttctacctttgccagtgtttggtgtggaaaaatgaagtgtcagcttatgctcaattttctatcttcaagaagaaactcaagtgtcttcaagttcaaattcttcccttctggtccaggcaggtccctgaaaatctgcattgtactgcaggccctgcaaacaaagccctggtcacacacattcttgtaccccaaaagccaactcattcaacagcttcatttaaaagcccccttggtgcttcacaattcaagcctcctcccttccttaaatatgactccacgtcctctattaaggaatttttctgcttaaaaacatgttatgaagtgagagagttgccatcctactcctggcagttagttcctcgttgactttgaaacattaaaaagtacttaagagctcacatttttattttatcacatctgggattgtgccttatactaaggatgttcttggtacagcacaggccttccaattacatagtactcctctaggacagagtgtaatgtgttttttttttttttgcagagtcagatatttaagtgaattttattgtcaggtttgctttgtagtcattttaaaaccagccactgtttcttaagctacctcagagggtaacttatctattgatgacacagctatatcattttacagggttccataccacatagcttaagtgcctggacatcgttattttaaagtagaggaaaaaaattttttttttggttcatgcttttttatgtgtccttttacatgtacttttaagtgtccatatattttgtaacagggaacaaaagagatggcttaaggtgccttgtaatatttattttgtaatacaaattatatgtttataatatttatttctctcagtcataaaagcaattcatgcccattatagaatattcatcaaatatactaatgtatgaaataagaaaataaaaatttctcatgctcccatcatctcaaggcttttaatcaatattaatattttagagcatttccttccattcttttttctatgcccatcagtatacattatagtatatattctgtaattgaaatctgattatacatagctttgtagaccaccatttttcactaaatgtcatgtactattaaaaccagagcctgatgccctttgctctctagacccatggctgccctattcctacttgcaagactgtgaagccatgagctttcatgatgtccctaataaaaactgttaggataagaacaagctgttttaggatcatgccatgccttagtgtcacctctaggtttctatgctgggttctgttacactagtccatgtcaaaacaaacaaacaaacaaacaaacaaacaaaaaacaaacaactagtgttctctttttagaagtactctctgtaccgggcatggtggctcacgcctgtaatcccagcactttgggaggccgaggtgggtggatcacctgaggtcaggagtttgagagcagcctggccaacatggtgaaacctcgtctctactaaaaatacaaaaattagctggcgtggtggcgcacacctgtaatcccagctacgcaggaggtgaggcaggagaatcgcttgaaccgaggaggcagaggttgcagtgagccaagatcgcaccattgcactccagtctgggtgaccgagtgatactctgactccaaaaaataacagtactctctgaacctctgttttcccctccacaaagtgaggagctagagcaggtgacaaaacccaaatgaagaacagccacattggccagcctcccttggcagatgctggcagtggcccacactctcctcaggcacatgggtgctctgctcctctcctctgtacccctctgcagccctgcaccacaccccaatatccctccacctgccccgctatctccctattaccctggggccattctgtgtctcctcccttggtgaagaggagagaacgctccaggagtcttcaaggttttaattaaacatgactccagctaagcagctgtacatattaaaacttttattaaaatcatggctaaggttccacattaatcaggaagccacatctttcctaaatggacaaaattgctggttagatcaccaaaaccagttgagacctcttagttgtcaggttttttcttccctaatgcaaaatccatatgagtcacctttcctgttaggaattaatacatttattaatatttgattggttatgtgattttaagaaaagggcactgggctttgtggaggaatttctgaggactccatggcaaatggaacaactcggcaccaaattagtggcgttggttcatattcttctttgatttatcatcttttccatgctttgaagcacaacagatatgatgggtttgagagtgagcactaaatctccactccctcgctactctgttgacagtagctatttaagagaagcctgatttgtgaggctgaccaggcctgctgcccacctctgtcactgcccgtcaggggattggatttccaacagactttccctttccttccaatctcctccacccacttttaataataggctcatatttcccaggtactttcctgtggccttaaagaatgcggttgcctttgtcttattctcagcctctgagggagtgctattttttttgtgtctgtttcaaagtgggggatgcttagagatctaggtattgactggcccacagtcacaccaactaaagacccagcagccgagactagaatatcccctctggggaggaattcagtatcaggcaaagtttggttggacccctccacaaagggcaatgatgaaagacttcatggaccactttaagagggcagacctcattcaagacatagcaagcagtctgcagtccacagagttaccaggaggctccccacatggtctcagttcttcttatagaagtagggacgtgccctggcctgccaggggaattctcaagtggccagagcccttgccaccatgccaacgctcttgtagagtctattttatcaaaggctattttgcttccagtccctttcagttaggactctccactgggttttatgatcaagtcataaatcctcagtgccactcaaggccctcagaatctggccctgctcacctctctagcttcccctttcctctctccacacacccctacctgccccttgcagccattctgaatctctattgtttcttaaggtgtctttactctcctcaccttctagtcttctgacaaatcactctctcttcagggaacactatcagggaaggaaagatggtttggggaaagagagggtgatttgttttggacatgttgagtgaaggtggcagcaacacatttaggatgtctgtatactacttagaagataggatatgggagaaacaagatattgggacttaagctgtgaaccccagagtcattttcacagacagggcaattgaagctgtcaataggaatatagggagaagtgtgcaggacctaaaaacagagcctctatttgggttagggaaagaaaaatctggccaaaggatatggtagaggtaggtttaactgaaggagatcagaggtgagaggtaagtcacaaacgtgtgcaattgaaagttagggagaggagctaacatttgttgagtgtggagtaggcaccagccctgtattaggtgatgtatgtacatgtggtctgggctcctgggatctaagtggacactcgtttactctcacttcttaaacatggccccagcctcattttctcattatcaagccagcttgccgctactggagcacgacaccttatcttcgtccagagttcattcctatcagtgtccagggttcttctgctttttcccttcagtcctggaattctctcagcttcagaaaacttattccctgtgcctccccttctgagctaccactttatcccaacagacttgtttcattggcttacttagttttaaaatttgtaaaattcttcctttcattgaaaatgttttgttttctctctccgtcttcctctctgttccccctactcccatgtgtttttattgagaggagctctttaagaatgtgaccacatcacagatcaatctcaaactccaataagacggctgggcgcggcggctcacgcctgtaatttcagcactttgggaggccgaggcgggcggatcatgaggtcaggaaatcgagaccatcctgcctaacacggtgaaaccccgtctatactaaaaatacaaaaaattagccgggcgtggtggtgggcgcctgtagtcccagttactcgggaggctgaggcaggacaatggcgtgaacccgggaggcagagcttgcagtgagccgagatcgtgcagctggaccccagcctgggtgacagcgagactctgtctcaaaaaaaaaaaaaaaaaaaaatccagtaagacagcagatctcagtgaagaaaccactgtctgtgtctctgcttccacctgggatcactctgaaaccatgtgcgactttagcaaaagtgtgtttgttttcaaatatctgaagaagaagaaaaaaagtagaaaataatcttaatatttcctaatattgagatattaagctgtgtgtaatgcaaatattcaaatattcgtctacttggcatcacaatgaaaagacatctgggaggaggattgattttcacttttcattcagatgtttttaatcgtgtaaaaagatatttagacgcatgacttcctttccatttaaaattatttcttgtaaataatctattccttctgttccttccttttgcatttttatcagatacttcatttatttcaaccttctttgccccccgccccccaccccccatttttgtttagaaaaatagaggtctcagcttcactgcattcttttgaaagaagtgagaaagagaagagaacccccacacacacccctatagccacactatacccatttctccagtagtgagctagggcatgtttaacaactggctcttcaaaaaagtgaggagacttggctgggtgcagtggctcacacctgtaatcccagcactttcggaggcccaggtggatggatcatgaggtcaggaattcgagaccagcctgaccaacatggtgaaaccccgtgtctactaaaaacacaaaaattagccaagcatggtagtgcacacctgtaattctagctactcaggaggcggaggcaggagaatcgcttgaacccgggaggcagagattgcagtgagccgagattgtgccactacactccagcctgggtgacagagcaaaactccatctcaaaaaaaaaaaaaaaaaaaagtgaggagaccttatttgtactgtttgtctatactcatagtgtaaatgttgccaccatggccactttaagctactgacgtgattttaccgaatgtggagttgggaagagatacacagctcacacccttatatagtatttccaccatacagacacaatatgcatgtaaatacctaacctcaaaaacatagatactagtaaatagttggaaagtgatgagttttgagtgatttattacctttataaaatataatgtagttaattcagaatttttcaacattactactgttgacattttgggcaggataattctttgttttggggggtctgccttgtgattataggatgtttagcagaatctctggcctctacccactagatactagtaaaatcctcagttgtaaaaaccaagaaaacctctccagatattgccaaatgtcccatggagtacaaaatcacccccagtgagaagcactgatttaattgtaagttcgcatattttaataatggctgtatttaacaatcttctttcaaagttcctgaaaatgtcacaatcaactttaaaagctggtactgtcagcttcagctcaacactcacagcattgactatagagaagcttgtcctaagaatacactggtttgccatagtcacataggatatcagaggaagtaaaaagagcaagattctgctatacttctgaactttttggtttctacatttaatgactgtgttcatcacatccctaaatgcagagtgacatctttctttcactgtgttttggttttctttgaattaaagaatgcttggctaacggccaatattcttctcaggtgcatagccctagagttccctctaaggtgactgtgattttctgctctgtcagagttggggacctcctgtaggtccttaggagctttctggaaacaagttttgcagtgggaaatacagggtatagaatgaaaggggacagggtctctaaggcagtgtcaggtagtgatcccggtgaagaggggtcaattccctcattctcagggaaactacgtcctagggtgagaaatcctagtctgcctgcatctcttcactccctgtttctccataggcaatggtcgagcctttaagatactggaaatcatctccagccatccctcttctgggacttttctgacctcctgacatccttatcctttgttcccacaaaatccccaaggccccttcacagaccaatgttacgttggcttcatccaaagctctcaccccacatgccagccaggcactggcgtaacgtaacctgtggactcatttgtctgaactcgtgaggcccagtccatacccctctgtccaatgtatggcaacagaagatattctgatattggtggtatttgcttcaggccatgtgctagtttcttagggctgccacaacaaatgaccgcaaactgggtggcttaaaacagcagaaatgtattatctcgcagctctggaggccagcgtcaagttgcagcggggccattctccctcccaagactccagggagaattcattcttgcctcttccagttctggtggttcctggagctccttgacttgcagaaggactccaagctccttcctcatatgtatgtcttccctgggtctcaaatctcttctcctgcctctctttggatttacagtccatgtaagcttaattacatctgcaaagacgctgttaccacacaaggtctcccttgcaggtaccagcggttaggactagtacatatctttctgagggacactgtttaacacactatagggatattaggagaagggttatttctctagtttcataagttattcaacttatctgacctcccaacatgaaaactagccaggaagtgaggagaaggaggctttgtggcctccagcatccctcttcccaggtagagggaaagaataaacaactctttcactcccttctcccaccaagtttgtgccccaagagctcaggcgagagggatactttgcaactccaagcagcctgcttgagccagcatggactaaggagcagagagggctggtgtggtcagctcaggcctgatctgagagaagcagagagctggaccccagagcacacagggctttgtgaccagctcctcggagtggcaatgagtcaggtgatgtggctgggtctcaggctagggtgggcctggtggtattccaggaacaaaggatgaggattaagaggaatatgagagtcagacccgcagggagcagaaaggtgctctgggacccgctgagtaccccagaagccatcagctgctggcgactcagggtcctgccactgcccaactctcactccatcccccaggcccctccggaagcactgtcatctggattttggggagctggttctccagtgacaatacccccagccttcaatgtgggtagccttgactttgtacctgagatagagagtgatcttaagattggcaacaagggatctcaagccgaaaagaataaagacggactcatgagaaagacgacagaaagagtaaaacccagaatgaactcaggtgctgaaagatgccagtgacggcccagaaggtctgtctcagctctgacgacaccgagaattagagggcgcttctgccactcagggatgatgatgtaatctacgtgaccaggacttcatacgttgattatttttgtaaaaactttctttttccttccttgtcttaccaggccccctctctcctttcatttctctctcgttgttagccctgctgtcactccttgcctccctcttctctctgacctttagtgagaaaaattcaaaatgccatcttagagctctatgtttatttccatctctttaaattctggcagagcccagccttcacctgggctcctctgacgttttatattcttccctctttttagtcatcagccttaatgtttcacggccctggggtgtgactggggaggtggccatgcccacttgcctacgtccagccctctgtcttgctttcggtgcttcccttgtttaccatcctggctgtggctgcccggatgcttccaaaagccaagtagtctttaagatcccaaattcaagagcagctttaaatctttgaacttctttccagggactaaaaggaaagaatgaagaatttagttcgtcagaatgaggaagtctgaaggacctgataaatgaaattggtttagacagaactggtgttttgttttaatatgggggtactgtgttgaagaaaaaaaaattattccatgattcttgctgaagcatggtaagacttcgttcaggaccatcatgatagggaaaggggccactgcagtgggattttttttttttttttttttttttttttttgagacggagtctcgctgtgtctcccaggttggagtgcggtggcgcgatctcggctcactgcaagctccgcctcccaggttcatgccattctcctgcctcagcctcccaagtagctgggactacaggcgcccgccaacacgcccggctaattttttgtatttttagtagaaacggggtttcaccgtgttagccaagatggtctcgatctcctgacctcgtgatccgcccgtctcggcctcccaaagtgctaggattacaggcgtgagccaccgcgcccggcctgcagtgggatttttgcagggagggagagagatgaggctcaactccaaatatagcatgagcaggtgggaatacatagccaagaagcaggatgggggtaagaggatggaaaattccaaggaggaaacatcacgggtaatggggggattctggctaaagtgacctcacaggattcttgctgaagacaggccaagatgatcagttattacctggggcctggtggaagatgagaaaccttatcagatatctagggtggagggtttttgctgaactgacttagcaagtttcttaataacactgggttttataaacgaggacacagacgtgcctaggagaaggttcaggaacctcactaaagtttaatctggcaaaaaatctttgtcaactgaacgtgaacttgagtttgaaggtaaaaaatttttttaacctttaaaaatggtcaactgaaaacaagccgcggaaccatgcatgatttgggtagaccgttgtagagtaattaatgcaatacaaattagtgacccgttttcaatcaattaaaatataataaagctaccaataacactatgttcagaagaatgttcagagaaattaaatagttgcgtgattaggaatttatttgttcttcttagtgtgcctctggaagaattatgcatatccgttcccatggccctggagatgtattcaagtgttggctggtggagaagttcatttgatgacaagccagacaaactagctttggctgtgggtgggcagtgtcccaggggtgactttcccctaatatgctcaatagtttcttattccctggcacacagagagcttgacacaatgacctccaaagcccttttagaatggcaatttgacaagcgtgctagaggggacttcactgtttactttcctttctgccaaagtgcttccacctggcacagggatacccactcccttggcagctgattctgacttatgaaagtactttatgccaggtctctaaatgttcattagattcttttgatctaggtaatagcattctgaaaatacagttactcatccataaaatggggatagtgtaacttcccgagctgtaaccatgaacgagaaggccccaactctatacaatagcagtggagttagccaatgattttggatattgttgtccggtcagagcctaaagacagcaggctgtgagtgtttgaggtttctctgagtgtgtcatagcaaaccctgcaaattttgggacccaaaagacctgccttatggttctagctctgctgttcataagctgtacaaacttgaggaagcttgttggtctctctgccctcgatttcatcactgtacaaactcaggaccaccacacttttcctgaacctgtccttgcagggttgttgtgaagatttttccccatgaggtaggactagagatcctccaacttctcctgtcacgggtcacacagctctggtatattcacggcaatttgtcctgcctgtgaccctcacctgttagtcatcttgcagcagaccccatctcctacctggagaaggcaaatgcaagtgagggagaatagcattattatagcaacagcatcaaatcttctctaacttataaacaggcataaatcacctgcaagctttggtagtttattatcagtagcaaattacttatgatacatctcacctatcatcgcttgctcggtggttgaacgctgcagagatgataaggtttctcccacctctaaagctctcagacctcatgtgtgtgttcaggctatataaatgtaaatgttgttgatgatgatgatacccaatgtatgcagagaaccagcccccggaggggagcgaggggcttgttcaccagtacccaatgcattcagtaaggtgctgaaacagcacaaggcagctacaatttgcaggccttgtctggcccgcaagttaagaatggtttttacattttaaatggtggaaaaacagtcaaaagaagaaaactattttgtgacacatgaacattatatgaaattcaaatgtctgtgaccataaatgaagtttagttaggaaatagccaaactcatttgcttacatattgtctgtggccaccttctccacaatggcaaagttaagtagttgcaacaaagcctgtctgtctcacaaagcataaaatatttactatctggtcctttatagaaaaagtttgctaacctctgggatagcatgtgactcaccttaccacaatccccaaatctagagacaaaaagagagcttaatttctttctcggccaggtgcggtggctcatgtctgtaatctcaacactttgggaggccaaggagggtggatcgcttgatgtcaggagttcgaaaccagcctgaccaacatggcaaaaccccatctctactaaaaatacaaaaattagccaggcatggtggtgggtgcctgtaatcccagctactcgggaggctgagacgcaagaatcgcttgaacctggtgggtgggggttgcaatgagctgagatgtgccacttcacttcagcctgggcgacagagtgagactctatctcaaaaataaaaataaaaataaaaaatttttctctcatctctttttccatgaatagctaggataatgtataatttatggtctcagtggagacgttcttgagagtgaaaggggtcactgcataaacggacacagtcccagaaaagctgggatgcaagatcaatctacttaaaatccttagtgatagcaaagcaaagtaaatctgtccaggatggggacagaaattcctgttggcccaaactctgatgatgcattctctggcttcctgaactagaagaggcatgtcttggcccaagaaccaagaggagggttagatgcagggaaagttggccttccacatgctacagagctctactctacccacctctttcccctgaaccaggccttcactgttaaatcaatattttgatatttctatatgttgttgcttttagagggataagctacatttttttaatttttatttttagctcataaaatattgaatacaacataaacacagtctctcatctttatttgtttttggaagtttactaaaactctcccctcacccgggctcttgttatctgtatgggagatcaggatcgaaagaagtcaaaggaagaagtgaagctatggacagttatgcattttctataaaaccaaatgcaaaatgctaagtattagctccaggcgaatgagttgacacattagcatgtgacttgaactaaaaagagaagggttttttaggggcctggacctttggatcctccaactagttcacctcaggggggaaaacaaaaattttgatttactcttgtaggggcagaagaagaagtgatctctcagaatagcaaaggctatttcaccttgagctttatacttctttgtgaaatcaatgcttttgagttgtgcttaaaaataagcttacagcctatgccagtcatgaaagacagatgttatttgtatgggagatcaggactgaaagaagtcaaaggaagaagtgaagctgcttgaaagacatcaggcaatagccaggaatctcagatctgctgcaccagaagaccagggacttggtgtctgtgcccaagtctaaaacatgagaatatcctacccctcccccaaggggaaatatattagcatccctccagttgccctggggagtagtctaactggtcacccaagagaaaggccctaggctaactttcaggcaagagtagggaggtgttggtggaagtgattcaggcttcatttgcattgaggggcaggtaagggtacacccacctcatcctactagattcccccatctcagtgctcctccgtcctggaactggtcccaggagtctgggaatctcagctaaacatcttcaaaaataatcacccttaattgtgggaactgactagaggacttaactgctcaggctttagttttttattaattggaatctggtagaaagaaaagggatatatctataaaggtgaaatttgagtcctgttcctggatgttgaaagtgttttatatattttggtaggtagcaatggggagatggggctttctgattcacttccaatcacactgcacaagttgtcgcctactttactttctctagagtccagcctaaatgagtgttgaaagtgttcctatttcccaggtagataacaggaccactatcccagaggagcttggagataaccaatattaatatattgtcatgggcctaggccttgagcctgcaacagaagcccaaaatacaccaagattaattctagattttaactaaatgtagttaaatttaaaagatcagagcatttttttgagacctaaaagataatatatgtggatagttatttcattctcaaatgtagataagaattaaattgaacaaatctgtcgagatgattacataagaattaaaaatcctatagttaaaaaacttaacaaaatggaaacacaagcatattttccataaatacataagaaaatagtcatcgtatttaatatatgtatgaaagcctcacattaaaaaaaaaaatgttaatatcccccccaaaaaaatgggcaactgatatgaagcaacaattcaaagaagaatacttaaaaaagattaataaaaggatgaaaaatgattgcaattgctggtattcaaagatgcaaattaaaaaacaaaccattctctactacaaaatggcgaaggttttaactgtaataacacaataatgccaatgaggttgtgatgaaataggcatgctttttatgctgttagcaagaacataaacatattttacaactgtaaagcagttgtataatattcatcaaaagtattaaaaatgttatgtattttaaactactaattctcatagtagttatgtatcttaggatacgtattaagatacatatgtatcttaggataataattaaaaacttgaacaaaaaatttctagaaagattttttaatacaacattatttataatagaaaaaaataccaaagcaaaaccctgagaagatgctaaaagcccccaaatgagaaaatggtaaatatagagaatatttaatattatagaaaaatgctcaggatattttgtggaaaaatcaagataaaaatttgtatatggtatattattttaattttgtaaaaacaattgacagggtgggcacagtggctcacgcgggtgatctcagcaccttgggaggccgaggcaggtggatcacctgaggtcaggagttcaagaccagtctgaccaacatggcgaaacaccatctctactaaaaatataaaaaaatagccaggtgtggtggcacgcacctgttttcccagctacttgggaagctgaggcatgagaatcacttgaacccaggaggtggaggttgtggtgagccgaaattgtgccattgcactccagcttgggtgacaagagcaagactctgtctcaaaaaaatagtaataatagctgacagaaaatacattgaaatattaactgcataactttctctggtgtttgaattgcaattgacttttactttcttctttgcatcatcacctaaagtaaatgttaaaaattttttaattatacatttatattttgccttattctaaaaaagaatatagggtttaaaactatcaataattgagcaacataaaataaatttaaaataattaagaaagatagaggagaaaacatagataagcaagttactatgaaccttagaatgtccttaatacaaaaaaccatgccatgcaatttacctgagagaggaagccacacgtttggctgtgggcctcctaagcagcacacacgaagcaaagcacacgaagtgctttccattataaaattcacagtttagctaaagcaaaacaaaccagctgcttaacaaaaatgtatgtggtctgaaactatgaccagagagaaatcttttatatggatccttaaagagacaccaatactcaacagcatctgaacaatcattgtaacaatgcatttatgtggcattgcttacaatgacttttcaaatacaactgatgtcaccatgctcaggtgcaaaccagaaaggcattctgatcacttggcaaaatccagggctagactccagaacaccgaaccagccattctatagaaggagttctgcaggtcctggagtttctctgtgaagaaaagtattcctgtgagtgtgagactgccgatgatgagggaggaagaagtgaagggcagggccttgaatagtcctattttttggatatcttgtttggtattcaagcaagtgtttccatggtcacacggatgtgtggatgcctgcatactctgtgtgcctgtctgagagtcacagggtatgttaccaaatcagacagtgttcaatacaggcctgctccaatttatttgactaatttcactgcaaaattcctgttaagatccagatgaaccaaccattaacttttctcagattttatttgggaaaaatgtccaaggaacacgcattgcctttaaaattaggggaacatcgtttaacaagtaataaatgaggagggttcctatcatggaatgttcatggactccctgcatccttgcccttcagtaaatcttgctagatttaactcaaagatgtttcctagggtctccttctcatagaggcccccctcagttctggtaatttttttttagcagcctgggtatttcagggggctctcttgaacaccccctgacttaccctaccccatttggcttttgcctttagccttctgctcccttatgctccagggctaagatccaagaaagacagaagctaattgtttttgttttatgccagggaaagagtgttcaagatgcagagctggagaaagtggtgactgttgatagacacagagtaaataaatcaggcctctaattaaatttacatgatacataaataggttgtctcatttatttagtaaacaaatttaggtagataatgagatttccactgaagactggtcattgccccagaggcatatgccggctacttaccctgttaacatcccaggttttgtgtagaatagcttatctggttcatcaggtgagtgtgactgcaagagatgggacaaatgacaaacagcaaggaagagaggtcactggtacaggggactgtccttctagatagttctcttagggagggcagaagcagggatctcatggtaactggaacaggaagagaacagatggagcatgtttatcttgatattaaaagtccagaaactgagatcaagagaggttggaattagaatgaggatgcatctattgtgttctttgtgaagggttttgctttgacttaggggtctagccaggagttcggttgcattggggaagctctcttgaattaacagagacaggctgcaaaattccccattgaccagtggtgtggtcttgggcaaatcatctggtatctgtatgactaacagagactaataatgatgaaaggattgtcaaacagttatgaggtttgaaatgccttgcaaattataaagcatgatgcaatgtttagttttacagtaatattatgtaaataacagcagaagcaaagtgtagtggaaggaacagtttctctggattaagagtgctgggtttgggctgggcatggtgactcacacctgtagtcccagcactctgggaggctgaggcaggtggatcacctgaggttaggagtttgagaccagcctggccaacatggcaaaatcccatctttactaaaaaaaacaaaaaaacaaaaaacaaaagttagccaggcatggtggcacatgcctgtagtcccagctacttgggaggctgaggcaggctaaaggcttgaacccaggaggtggaggttgcagtgagctgagatcatactaccacactccagagtgggtaaaaaagcaagactctatctcaatagaaaaaaaaaaaaaaaggagtgctgggtttgaattctgacttttgttcttttccttgtgtgaagttgacactggaaaaaaattctagttctctctggttccgtctctgtctctttctctgcatctgtattttatactctctctgtctctctcacacttggtctctgtctatgaaacacgtgtgataacttcttggaaaggaatcttgatgccaggctttggaagatcctgttcctcggaatgactgtgcaggtaaatgttctttagagcatcaacacagaaactaacaaaatgaagtcacatcacagtgtgcctttaatctgcaaatgccccgcagaagcctagcaggcgtaagacaagtaagaatgtccaggacatggtatctgaacaatctgtcacatccatggcactcacccaatcccgagaccccaattttaggttctcaattatcagactggtcctatgagctcctggctcaaattccctcccaggccctgttactgagatactgaacaaaatgagattgtgcctttagaagcagttagaaggaagtgagatacccattcttgtaggattttgggtggggtttctgagtactattcaaatatcttcctcctctatgactgcctgagcaggaaggccgtttccctctgctgcacctgcatggtgctctgtttctgtcactcataggcactcatcctcttcttccctccagaagtggctctatctaggcagatctcccttctcatgaagactgagcaactcaaggtcagggcttaagtgggagatatttctttgtcttcatacactggccccatgctttgtacagtgaaggcccaataaatgcttgttgaatgaatgctcgacttgagtctgcacgcaaggaaggggtggaggcaggattgtgccatggccacctcctgcagcctactctgcagaggcaccacccatgcccagtcttcccttagtatcatcctttctacatgtttctctctgcctaagaggtaaggaaacaaggcaggatggacatttaagccatcactgagcaaaaactcagcagaggcaaatgcccagtctttccaatttggaaagaaagaagtaagaagagagaagaaaggaactccttcctgttttggggatccagagggctgaggtccctcactgccctggtcatctaggatggtcaccatctcctggagctctgggtcttggtgcaagcaactcccacttctttagccaagacgggcaatacaggcctcaaggcgcccaggccacacttcaccttcccagcctcctccctccagtgcactgacagcagggagaggagagcagagctggtgggaagtggatatgacgaagtggtcctaggaggtgttcccctggctctggggctaggggcgggttccaccaggtgtggccctccctttgagcagctgctctgcacgggctctgctcatgctttgactcttttattttattttattttatttgagatggatcctcactctgtcgcccaggctggagtgcagtggcacaatctcggctcactgcaacctccacctcccgggttcaagcgattctcctgcctcagcctcccgagcagctgggactataggcgcgtgtcaccacaccaagctaatttttgtatttttagtagagatggggtttcaccatgttggccaggatggtctcgatctcttgatctcgtgatccgcccaccttggcctcccaaagtgctgggattataggcatgagccaccatgcctggccactttgtctctatttctgtctctgaaacatgtgtgacaacttcttggaaaggaatcttgatgccaggctttggcagaaccacatggtatggccatagagatgggcagaagatcggaccttgtggaaagaggcaccccatgtccacccacactgactcatccttgcttcctagccctcaacacttctttctgcctgcctgagacataaggaaactacaacaggaagggcataggagccgtccctcagcaaaaccccatagagctgaccactgctgaacctgtggcataagcgtcagcccctctgactccccgccattgggcagcaggatggcataaatagccccaaaccacgtcagggcccgtttttgttcaagctgaaccaaactgtcatctggatggcaattttccgctccacatctgtttagcgtaatttagaaatcacagcccttgcacctacatgatcggtgccacatgttgctcatcttccttattatcccaaattaaagtgttgcctggtatctgggttttctgcatggactgtaataacggggctctaatctgacacccagtcaaactgggagaaagcagattgaatcaaatgggggttatgtcaaccggagacgtgtgctgtggctgggcctgaaatcctacgctttggttataaggttgctcagatgccagcggtggccttgcggtttggctcctgtgcattacagagaaagggggagcgggagaggacaccgaagcgagtgcatctgggcttcattagtggcaatgtaatttacaaaaggcagcttttcagatgttgggataattagcaggctgttatcaaggtagtgcacggtaatcacgggttgacatgagcaatccatgctgggtgagataaatgggtttgactggcagggcagcggttggactttcataaaaaacaaattggattttttttcctgtggcttaatataagaatcatgtggacatatgcataaaaccgacacagtagcaaaaatccctggcagaaagaaaatgccactgtgctgggtctcagagccaatttctgcgttataaattctgtggctgtttgggcagtggttgaaactggggtgagtgggttgaggaggagaaagcaatgcagggacctctcagcccaaccccagcataaatcacagaataatggacaagtaatttaatactgttctgaagcctcagagtgaatcattgcttttcctacaatgagtctgggttctggggggtgcagaaccttaagctgttgactcctagaattacgccctctttgggagctgtatatcggtgtgcccagcttcgtcaagactgaagtattttgctgagggggtctttcaaccttccctctacatatccggcatctgaagcaaatgaaacagctctcaatctgatgagttgacagtttttcaaatctggcatgtagtgggtgctcttggagaagcctcaggatggctcatatatgatgagttagttcccagagcgtagaggaaaagagcaaaatatcaccaaagtgtatagaggacatcgctgaggacatctgggaggctgtcagggatttctttgcatataacaatgcacataaaaatcaaagtctagctgaacatttgctatcacatcattcccatgtggataagaatttcattttgttgaagttcaaattaaataagccatggggatctttaaggcctctgaagcttgtgggatacaaaggaagagcggatactatttttcatggcaagttgatagaaagacagctattggtgcaggaataagttcatctttaaagatcagaaagagcctggaacgctaaagctggaacggaacttaggcataaaccatccataggtgaggcaagtcaaagacaaaattgctaacacaaggtcacacggcaaattggccacagtgtcaaggctatggccctgggctttgggcattttctgttgtgctacttggtgccctgtggatttccagacccattcagcagggctacctagagatgctgaagaaagggcctggcaagccaggtgctctccagaacatcaaagtgcagatagctagtacttcttcaagagtgtgcattctcctgctgacattgctttttagactttctccctccccattcagcagtccatgccttggcttcctggcatcaccagccaggaaagcacagagacagtgctcagattgtctgaagggcaggtccaggggtggggagaagagctggactccagggtagatgcagtcccaggctgggatctgcactaaccagcgggtgaccttgggcaagtctcttcactgctctggcccttagactcctttgactctgaaacgtggacatgaaatcaaccatctctgtggcttttgaggcagtttttgctttgctgcagtggaaccctttattccgggtgaccccttcatcatcacatacccctgcaagaaagaaagagacagggtatggtggttctagttgaagacaaggaagaaagccagagaatgccttcacatgggagcccccctacccccaaacaggccctgagggccctcctcaagcttaggactccacagagttaggaaaacactggaataaccatcctcaaagaccctttcggcatcagcacttcatgattctattaacagcctggagtcaggtgtccagacagagactatgtaaattagggcaccataccctgcaacctctccctgagctacagtattagtctgttctcatgctgctgataaagacatacctgagactgggcaatttacaaaagaaagaggtttaatggacttacagctccagatggctggggaggcctcacaattatggtgaaaggcaaggaggggcaagtcatgtcttacatgaacagcagcaggcaaaaagagagcttgtgtagggaaactcgtttttaaaaccatcagatctcgtgagacttattcactatcatgagaacagcatgggaaaggcccaccccatgattcagttatctcccactgggtccctcccataacacgtgggaattcaagatgcgatttgggtggggacacagccaaaccctatcagttagtgtagatcaagattcactcttcttcctctttacctagaggaaagagcccaatgcaactagggggtgccaccctgggcctgccagtgccgccacccctcaactttcccctgacctaagaaacagtctggcttcgaggattgaagaccatatcctgcaaaaagacaggtcttgggtgtctgacgaattggcttatagtgtccatttaggttgccagaaaagattcatcaactgtcagctcatgtgagaacgagagcagagattcaccaagcatgtgcttttgtctcacatcagtgttttaggccatctgggagacaaagatgtggtgaggagccagtcactcctgtgtttgcagagctgggggaggttgcacttgctagaaggatggtcccatgatgggcagtgatgcctagaactgtagcatcccctggggcagggccctcatctcctttttctacctttactaatcctttatcgtcatggccacagatctcctccgtgtagacttaccggtcccatcccttcccatgcatctattattatctgttatttaaggcaattagacacattcctaccaccttcccaccattcagactgctcgttaaatttctttttgccttttgtcacacctgagggaggggaggaagtgactgagcagagcatacaaggaccatgacagatgtcatctgctttaagcgtatctgaagtaggcatctttatttacttccatatgaagaaactgaggctcagaagggtaaaatgactcaaagagagtgaagggcaggccaaagatctgaacccaaacaccccagagtttattttacaaacatccaatgccacttcctgcgagaatgtgggtgaagtcttgggctcccgaggcgggtgccatgcatgggctgacaggcatctaagaagttctccagagcagcggtctccaacctttttggcactggggactggtttcgtggaagatgatttttccacagaccaggggtgcagagtggtttcaggatgattcatgcacattccaattattgtgcattttatttctattatcattatatcataatatgtaatgaaataattatacaattcaccataatgtagaattggtggaagccctgagcttgttttcctgcaactagatggtcccatctgggggtggtgggagacagtgatggatcatcaggcattagattctcataaggagcatgcaacctagatcccccgaatgtgcagtttactgtagggtttgcactcctatgagaatctaatgcagccactgatctgacaggaggtggagctcaggcggtgatgtgagcaatggggactggctgtaaatacagatgtagcttcgctcactcacccaccactcacctcctcctggatggtctgtggccctgggggttggggacctgtgctccagaggacctgctagcatggctgtcagaggcatctgcaatcagcatggggcttcactgagagcagtcatcaggcagagaaccgagctgaacagggagggacaaatgtcaacagagcacctgctgaggacatgggccctgcccttaccaagttggcattgacagttgagggcatttgccaagttagcctgcagttggaaggcagtgtgcatggtggtaggaaggaaaatgtagagcaacacccagacgggccggcagcatggccctagaggaggcaggaaggagaggctcatggttctgctcctgatctctgggagcttaatgggcagtggagttgttgacaagcacacttgtaagccagactatttcttaatgccttgtgattatttagggatttgcttttcagcacatcctagctctctgcttcattcatttcttagtctcaaaaatgtgtctctgtttcacttcaaatgacctagagcagccaatcagtcagccccagttcctgactgcaccccgtgcacccactggctaattatgaaatgggataactgcaggctcttgcaggttcttccttattccagcttcaggagcacataggcacatcttaactgggaggctcaggaggtgcacagtatgctctcatataaacacatttcctctgcatcaacctctggtgttcagaatatgcctttcatgagcccatcagccacacccctgctgcaaagccccctggactccactctgttggagcatttggcaaccccagcagacttgaccaaaagaaacaccatgctggggccacagcactgcagaagagcaatcttctgcttagaaactttccaaaggactgggaactcacttatctgccggcaaaattgccagcttgggaattcagcactgcttctctgcaaaatcaggcgctgaattaccctgcacttaacaaatggttgccctgctctcctaaagctgccaacacaaattgaattgtattttttcattggtgtatatagtgggtgtgtgctagagccagcactaatttccccctagcaagataaatgcactgacccgagccttcgtgctttattctgtctcattctagcaaattaaaatgtcacagagctatagccatcctttaggagactgggtcaggtggggatgagggaggttgcagtgggggtaggaagcctatcaattggtctcctgcctcagctgcaacttagataactaaagagaataaaaacagatgaaacctggtgaaaacattcgcagctttccataaaataagtctgtagaaggccgtgtcaatggaatctcgcaagaagcaaaatgtattatttttggcagttttcttcagggtaatttttacattgctggtgtcctctcttggatttccacctccccccgcaacaccgttcacccttataaccaaccacaatcaatttggtttaattgagttctatgaaaattttcacctagagaggccacttcatgaatcaaagttcatcagcatacaacgttgaggcaatcagaaatagagtctgatttagagaggctctcacagggacttgcaggaggaaacggggctgtgtttgcagctggagtgccgctggttgtgcctgcctgaattctctgaagttgccgtgcaggtattaataatgtaacacctggtttcacatgtgtttttctggcagtcatctccccagcatcaaagggcacttcagcaggctcaccttcatcctttttggaaagggtgtgtgtgggactgtgctgcgtcccattttccagagcagaaaatgcgggcttagaagaacctccccaagtacctaagcagtagctgagagaagagttcagcacggcctcccctcctcatcagcaaaaggtagaaacaccaacccgcaggaggccctgcctcaaagcaagtctagggaacttgtacccattcctgcctgcacgcccagaggtcaagcttttctcaccaaatcttcattaacaaggtcctgccaagaggcgcttcataccagaagcagtcagagagatgctgtttggaagctgaaatatgagtctttctcagacatttcaacggtttatagggccggcaggaccaaacatataaaatcaagtctgtcccagaaaattcaagctaaatggtagccaacccatgggggcttaaaatcaaaagcagagaacaccagcacagacaggtgggaagaggcccatgttggtgatacttaaccccctcatgtacgtttcggtttagaaagagccttcttattcaggatctccctcgccgtcctggaaggtggatggagaagtggtgtcatggccctgctcagccagcaagaagcccaggcttagggagatgcagtggtaagagcaaatcttttttgcacagctgggatccaaacacagatctgctgacaccagagccatgctctaaccactgcaccacagtccctcaccataccagcttgcatgcagtgggacttacttgttctgctccggcatcagtaaatgctgcaaggacatttttttttttatttttttcagatagggggttctggccaaggactctcctccctcgaggtctttgtacttggtattctcactacctgaaattctacccactatatatccatctctctctcctttttattgtgcaggtctctgctcaaatgtcagctcatcagtgagatcttttcttcagtgagatcttttcttaccacccacccatgcccatcacattccattttcccttattgcatgaatcagtctttatttgtatactgtctgtttccttcctgtgagtgtagtcatgagcactgacaccttgtcatgtttgttgttctattcccactgtcaaggttaggagttggctgtttttgtaaaaggcctgatagtaaatattttaggttttgtggcccgcacgctctctgttgcagctgttaaactctgccatagtagtacgaataatacatgaatgatacgtgtatgaatgggcctgacggtgttccagtgaaattttggtggacactgaagtttgaatttcatataatttttacatgtcacctgggcaatagagtgagatcctgtctcaaaaaattttttttacattttaagaaatagtcttcttttgtttgcttttaaacccatttacaaatgcaaaagataagcatataacattcttacccatgggctgtacaaaaacaggtgttagactggatttggccttgatgccatactttgcagacggacctctgatccaaattagtggctggcacagagcaggtgcctagtaaataattgttgaaggagtgaccaaaccaacgcataactatatcatgaaattgcatcaagcaacaggtaatcagccatcaggtgtttatggagcagctgggtgctctgagggatgctctagaagtcagatccagcccagttctcagggagccacagtcttgttttacaagtaaggggagggagagaaaggagggagctgtagaagttcatcaggaaaagagaagccaggcagatatcctagtttccctgcagcttacccagaaattgagttcccttggtaaaaactgctttggaactagagacgggatggtgagctcagaagccagggcctgaggaggacagtgttgtcttgggggcctggtgctccagagagacaccacagaatgcttgccacagagatgcatggaccaccacaatcccgctgtccagggctgcgtgaaggaatgcactggacatagtggggaggggaggaagaggcccctcctacagactgaaggaatgggtggatgaggggcattttcccaagacaaaatatttgagagaagtcttcattcatctgttcagctcccatgttttgagaggcgtggggattggagctgaagaacaggcaggcatggtcctcacctttaagggatgacagtagaaaggggatcatagacgctaaaggttattgtgttaaatttgtgggaggtgctctggtgaagaaatagaggctgctatgagaatataataaccacccagataggcgccacaaaggggatggattttcctggcacacaaggtcaggggggcataccaggcatgcagggcaagtgacaagtcgccatggcacaagagagccaggcgtgctcaggaactgagccatcagtatgaccagactgcaagaagtgtgctgcttccctaggaccttgcttactaagctgaggagtttgagttcaatcctgaagtctgaaacgtttcatttaaacggtggccgaccatgtttctgaatggcccacaacgctgacgtctccttccagggctcaagacctctccacaaatatgcctcacctggcaatttccaagaaaagaaatcttcataactaattcaggataaacaaatccaaaatggctttaagtgacatcagcagagagaccctcaagtgccacaatttggaaatgatactcaacacaggccttagattcttgaaaatgtgacttgacttcccaccttgcaggatacaaagttaagcgttgcctccagggagctgagctcctttccctaacattggttcttggtcttttcatccctcagtctagcaaggctcagcccattcttcacctgggctttctttgtgtttgcagatattctcatggtattagtctgttctcacactgctataaaggtacttgccagtggggtgctctagttcacacctgtaatcccagcactttgggaggccgaggcaggtggatcacgaggtcaggagttcgagaccagcctggccaatatggtgaaacccgtttctactaaaaatacaaaaatgagctaggcacggtggtgcacacctgtagtctgagctactcaggaggctgaggcagaagaatcgcttgaacccaggagacggaggttgcagtgagccaagagcatgccactgcactctagcctgggcgacaaaatgagacaacatctcaaaaaaaaaaaaaaaaaaaaaaaaaaaaaaaagatatgagccaagactaggtaatttataaaggaaagaggtttaattgactcacagttccacatggctggggaggcctcaggaaacttagaatcatggcagaaagcaaaggggaaacaaggatgttcttcacaatagcaggggaaatgccagattcttataaaaccatcagatcttgtgagaactcactatcacaagaacagcacaggggaaacttcccccatgatccaatcacctcctcccttgacacgtggggattgcaggtccctccctcgacatgtggggattacaattggagatgagatttgggtggggacacagaaccaaaccacatcactagtctataaactacctctgtgtgtggctgagcccctctctgtaggtctctaggtgcccctgagagtttatctctgacttctttgtggccccttaggtgtccttagctctctctgcaaagctgttcattttcatctttcacaaacagggagagagaacacatggtaaggtgccccctccactatctccctccaggactgtgggctcttcctatgtttctttatgtctatttttctctcctccaactctttcttccccctcctttttctccttcctttctccctgagtctctgctctgtaattatccataatataaacagattttattatttgttataagtatttgaaaagattttgtgtttcctgcttctagtttaaaaggctgctgagagaacagtgtctaattcctttctcagaaacaggtaaataaaagttttgctttgctgatgagccctggttggataaaatgttcgccatctgcactctgcacaaggaagccctctgccagggaaccctgctttcatcaaaatcactcctgaccagccagctttactgtcgagagagcgaaacgtctaaaagagataagctatgcccgtcagaggctttgaggatccttgccctggagctggcatttaacaagttctaagagagagaaatgttctcccaggactcagcctcagagcctgctcctgcagaccctgtttctatcttagggtgagaccctgtgtctcaggctgtttgacctttacaatccctcacaatccagaatctctgaacactttctgttctaatgtttccctcttcccatgcagctctcccagaattttaacattcttgagcactgtcggtcctacctgggcacacctgccaagcttccttggaaaacaggccctaaaaattaagccaacttcataggcacagatgactacatacacacttatcaactcttttcctaaaacatcatcttccaagtccagtgtctttgtgacatccggagcattgatcgctcctatttctttatcttctctttctttttagaaatccattagaatcctaggttttaatagttgtttccttgatataaggagtttaattgtgcagctcttagcatgccctagagagtctaatgagaaataaataatcctaagtagcctcccttaggaatgaaggataaactctacccagaggctctgttgttaaggagactttgctagttgtttccacagtgttaggctactccccaattaagcaggtggttccttcaggcctggggtcatttcttatcatttcttatcctactagggtgttccctttcctctggagctctgagcctgggcaagcaggacctgagctggaggctctgtgatcagcaagcttataatgcagaggagggaagggggacaacctggaacccaggttcttcccctcctagagtggatgtggggttccagggacccctgaagaactttcaactggaaagcagggatccctgcttgcccaggatctgtgctagggactgaagggaataccctagtagaataatcatgttagtcagttgatggtggaatcagcaccaccccaccagagccctctggtgccctttgattgtttgagtgatggccaagaaaccctatcagttttcatgtgctgccacgtcctcatctgtaaaaggagacactgtctctggacctcactagggggggggaagaaaagggaaagaaagtcacatttactgggcatgttctttgagtcatattctgtgttaggtactttcccattcattattacccacctacaaggtacatgtaagtatccaacccattctatagacaaggaaactgagattaagtgatttacccaagtaatgcattattagggatacagatgggattacttggctatgtaaggatgcagaatgtcactggaagggctcactaggtgttaatcattgctgctgctgctgctgctcctgctgcagctgttgctgtaattatagaaagtcaggctatttgatttccaaccccatgctctaagggtgaatgaaaggaaacttgcaaaattccttgagacgggcaggatgatgagcctcacaggttggataaattcaagcagtttaagccataggcaggttcaagttaacagtcagtgcccagagggcttgctggtggggcaatgtggcatgtgattggaagccctctgggtgctcagtctctggccttcctctttggatggaaacaggggtactgcagagagccaaggctaaggtctgaaaagaaagactcatcccccgccctgtcccacccaaggtaaaaggtggagagacccagcataactttagggagtgcactgtcagcccctcctacagaccatacacaagggtcagttcaaagtgctgtcattgcccatggcgacaccactgccaagcgattgtttttccacctagtcccactgagaaaacactggcaacacacagcatctttatagatgacaaaacaggaccccaaaggggagaagagcttctctcagattccagttagttctttccccttctttgaccacctctgctaaccgaacccacacccatgctttctcttccttcctgcactttggaggttctgcagttagtgagcttacagagcaggggagggaagggagacaatctggtacccaggtttttccccttctggagtgggtgtggagttccagggacccctaaagaactctcgacttgaaaagcctgccctccctacactttgagtcacccacctgaaagcacactagacatttgaattcctgactgcagccggctctcaattaggttttcactgccccttgtcagttccctagctagatttcggcagtgacacttgttgtagccactacagaatgtggcaatggaaagaaaaaatgtcactatgccgttgtcaaaagaggaaaggcactctgttcaatcaactgtgagagagattgaattatttatagtgcctttgtcagtcactgcaaaaggtaatttcattgcttgaattttaagtttttcattaattaaccactttttcagttcagtgctccgcagccaggcagaaacccactgcagagccatttctgaagagggcgggggccctgctgctcccagtgacatatggatgtctctgtgtttttgcttttctgcagtcacttttgctgtgtgctggtacagatattggatgtttcatttaaggctcagagtctcacccaaactgtctgcaatttaatatatctcagtatatacgctggtaaatcatctctgtgtcatttctctcaatgttctgttattaaagtccatttttcatggtaaaatattcctccaagagatggcacaaggtacacacatccccaagcctagtatttaacgctaataggctgagctttctctgaaactaaacttggaattgagaaaatatagcagaatgaatcaggaaaatgctttcttagaaacggaatgggatttagactagaaagggagttcagaagaaagcttacattttacctgaactgtccagataattgctttattttttttcttctcttggagagtggaaacgtggccagacgcaccttgggaatggtttcggggagtctgtgcaatgataccccaaaaggagcaagcatgcaaagtttataaaactttttcaggtgaagcaataagttaatgatattgtgtgattgtgaacctcctgtctgaaggcaagagtcttccaaatattacccctgctagaaacagagagtagacaaaagctgtgtcaattcaagagaatacttgaatacgtactaagtgccaagcacaggacaggtctggggatgtggagaatatggacttgacccctgcccatttatgagcgactggaatgagatggaaaacactggcagaagctgcttcttggctcttggaaaggccagtatttctggggcctagtcatatgatcttactctttctagaagacattaataatctgtcaacaaggatggagtatctatcaaatcctaaatgctgcaagaatgctgacgcccagtaagacaaccaaaaggtgttacctggtctgtgttgcctttggttgttgagaacagctggcttttcttaaagatccctcctgcactgtgacttcttcatttacatagagcaccaccccagagttccttgaatcttaaaacataaaaaaataaaaaatcaattatataatttaagttgacaaaactaacatattcattgtagaaaattaagaaaatgaagataaacagaaaattactcatagcttatgacttaaagatttctacatttaatgttttgatgcttattctttcagttttttttctttgtatatatttacatacatggtttatatatcatattgcattctgttttgtggctttatttattatgtagatatatatgatgatcatctcccaggtcattaattactttccttcaaccttatctcccattctcattatatgcatgaattagttcatttaactattctcctttttaagctgtttccaattatcttttgccattacaatcaatatttcctataatattttggaaaatacatttttattcacttccataatcatttccactaaatttgggttttaattgctgaggctaggatttttgccaaatctcaaggtttttgccaaattttcctccagaaatctccaaccaatgtatgttcctaccggccatgtatgtgacaatttgttctcccacattcttgccttggttcctttgactgtctagagttcacttcttaacaacacatgagtgtacttgggataccctactcccaactatcatcaaagttccatgcagacccgaatcagtatatgcagagcttcttatttcttgttttggggtgcagcaaattgatgttgctactattgttagcatcttaaataaaatgaggcaggctagcagcccctcctggaagttctggcaaactcggtgtaaacccaagatgcctagactaagcctgttgtggccaatcaaatcatgtggacctctttaatgactaactaggatttggccatggtgaatggccctcgcgaacatgcagaaataaattggaccgctcataaagtgatccaggcagggtgaccctgggtgggtggccctggctccaaacttcacatggcatcctgtcccggcttttgtccctgtaagtttgtcactcaaccagccttaacctctcatacggagcatctcctggagaccttccacagcttgacacactgggagagtcactcgaagaagtaagagctgacaggtgctgtcccacaaagctctgagtgctaatagcagtcccctcacctgcccatagggtttctctttcttttctcttctttttctttcctcccttttttaactgtgttaatttaatctcgccaatatcaaactcctatgcgagaggtaataaaatccttttaggagtgaagcagagtttatgttgagaggaacaatctgtcagttttgcagggtgctattagatggctgctgtgcagtgtgctgaggcgaggtgaggctggctgcctttgtctgtggccctgctcttctttgtgacaagccttgcccagggcaacgtggtggctggtgattaggagagcttggccactacctcaggagtgctccactgaagaacctcatgaaaaagtggatcccaagggctcttcttgtttgtttaggctctgctgttgttattctctgctgctgtggctatctgagattgcttttccataatccacctgcttgatacctggtttctagcactcctctgttcccctttcctttccaccggcctcccctcaataactgtgagcttcctttgggcttgctaaacactaagcagggtcttgggatgtatatgtatccatcttcctgcccttccgtgctcaccagtaggaagctaacgccggaagacccgagttcaaatctcagttccaccagttagggtctttatgtccttgctcttagatcttctttgcttcagttttgtcatttgcaaaaattggcacagtaatctttcctagcatttatggaagggttaagtgagaatatagtaaatcttctgccacagagggcaatgtcacttcatgaccccaaagggcaccatatcacgttgtcacctagagttgtacattagtcccttctccagctccgtgtctgtacagagtaggcaattggcaaatggaagctgtggttattgtcgatattattttttgttctgcttttttctgaaagctacctcaagtcacttgctgtgctgttacccctaagggtattctagtgaatgccctggttataactggcctgcaagcctgggttcccagtctctctgtaataaagcaagagaacacaggggtcctctcagattgaaccctagaaaataaccatgcaggaaccaagttgtggccacacaaacacactaaaaataaagcaacaacggaaagatgacaagagtggctcagcctccctccacctctgagtggaacctgagataccccctcccttcctgaggcctgcaattcctcacgcataatgacctcagtggtttctctgagttatgctattccaagactctgcaaatatgagtgccttttatcatttctatttttaagagggaaatggagaaagaagaggagtggatgagagggcaggttgaccagtccagtgtgaggcagctcctcagaatgacaacagtagcgacaggaaatcttctaggagatggcgttttgccacaaggtctcaaaatagctaggaagagagtcttctcttacaagggtggcggtgggggtggtggtagggatcctttatgcaaggcacagggttgaatattctatgttcactcatttttattggaagatccatttgacagtgtctgtttttctgattatttgattttgttttgattttgatagttaggatagttgggtaagaagaagcacctgtcaccccttgagattggcctttgagagtccaagttagaattgtttgttcatggggtgccaagtattatcccagggagttgggagaaggtagcttcccatgtagctgagtccaaagctcgcaccactcaccgcacgacagccagtaagtcaagagacaaggtgttggggcaaggaagatgccccattatggaagatgtccccataatatttcagggagccagcaatctgagaagatggtgggctaatgtcctaaagaaccaccttaaagggcataaatctcaagcttctttttatattgggaagggggaaaaaggaggcggctgaggttaggaggtggcaggtgaccacaaatgtttgggcatcagcaggagtctaaaagggttgcataacttctttgcccttggtcaggccacagtgcttctgtaaatcattagaaaaacattattacttgtgtgtatgctccttatctctttgagggctagttttaggaagggactattctcatccttgtcttagagttaaactataaacttaactccccccatagttcatttggcctatgtgcagagataagcaagaacagttaacctaaaagatatcatcgcagatggtgagagttgggggtcaggagcaacatggagttagccatgttaggcctccttttcactgttatacccacatcagaaagagcctcttggtttgtatgttacaaaaccataaattcctctccatccctttgatatctctttcagcctctgccatgtctgtctacagaatttggctgatctcaggtgaaggccatgacccacatgagcaaggtcactgtggaagggcatgtgctaggttttgaaaatgcttcttttttattaatattctcaaaatcaggcaggaagatattcctgagtttttctggtacttccctgctcctctcccaattcctatatagactctccaccccgtggaatctagtgatcctttctgaatagcgctaggtgttcccgttctgtaatccaagtaaaccctgctgcaacaaatttaaaacaaaaccatatgtaaagacaccctacccaggtatctagcacagattatgagtattcaatatacctacattgaatttgaaatgaattatctttggacagagatgtggatagttaggctgcctaagaagcaaatatatcctaccacagtctgggctctgcgccagcagagaggagtccagcatagcccctcctctttgggagaccatgtttttgtgagtaaagccacataaggagcagcttcaattcacagcctggagtttaaatggcctctccatgcaggagatgtgatttgcatttgatcttagcttacctttgggaaacaaatcatttccccaaatagaaggtaccctacttaagatagacccaatcctttcgaatctgttaagccctctgttgagtattgtcattttgccagcatccccaaactttggtcactggagcacttgacagaaggctaatacttaagaaataagttgtaataatgagaattccttctctgtagacagtctttgcattccagtaaattgggtccacattcactggatgagtattttgtgaagtgtcatactcaaatgtaaaaggtttatggatgagaagtttcagattttttttcccccttcttcactctcttctttccaattgttctgctattgagccaatgcagtgtggtggttcattactaggagtgtaatggccttatcaaggaatgtaattgtcctgctgtactggccctgggcagacaccatctggagggtgagcatttggaagtttcccagcttagagagaaaactgataaactagagctgagagatggttacaggcctggaaaggaggccatgcagtgaacagatcaaggaaatgggatgtatagtgtagaaaagagtagagaagtcctggtaattgtgttcaaatagtggaaggactctcatgtgaaaaggggctagactgaatcagtctttgtccagatggcaggactaggacccataaatggacattagagagcagcagggttgagtttagactgggaaagacatgtctaacaattaaagctcatccaacacagagaagctgtctcgtaagccacagacggcacccacccatggttgtccagcagaaactggctgtctgcctagaagagcaaaggggatgctggacctagttgggaaggggattggttataaactttgcttggcctgctggatttgatggctcatccttgtccatcctcctctctctattaatccaaagttcactagaagtccttgctgagcaaggccctgggtcagtgattctcagtagtatctgttgaaaaccttttgaaacatcactacttagaccccaccccagaatagttaaatcaatatatctaggggtgggactgaggcatccacatgctttaaccaccaccactaccccccatgcccggccccggtcattttcatggggagccagggttgggaacaactgcttcagacaaaaagagaatgtgataacaacctcgctcctctaaacatatcgtatgatatttttaaaaataaaacagttttgtctcaaattagtagcatttaagcttagatcctcctagatggttttagtagcttccatgcttacattattttagcacagatcactggctttgaagggtatatgaacatttatgaacacatgtgaaggttatatgaacatttggatggacagtgaacatgctccattttcagacgcgatggatgtgccattgacagtgaacttggtattctcttgtgctcctgtccctcagcttgcaaaaggccagcagcttcctccacgcccagcccaacacccctcctccaatcaccgggctactgttgtatagccaggggcctaaacagctacaaactgggcaacttcccccttttttagcatcttctggatgatgcaagcactcagtttccatatggggctggttgtgagccaagaagagaggaagcacaatctctggaatggaatggaggcatggggattgtttaacagctatcgtgggatcatctaaagctgtgctgcccaatagaaatataatgcgagctacatacttaattcaaaattgtctagtagccacttaaaaaagtaaaagtaaataagtaaaattaattttaataatacattttatttaactcaatatagccaaaatattatttcaacatgtaaacaatttaaaacttactacattaaaattacattaagaattattacatattaatgagaataatattagactaaaatcacatttaaatttattacatattaatgacatttcaggtacaatttgtatactataaaatttacttgttttaggtaaaaaaaaaaaatcaataatttttagtaaattttacagagttgggccgggtgccgtggctcatgcttgtaatcccagcattttgggaggccaagttaggtggatcacttgagtccaggagttcgagaccagcctgggcaacatgccaaaacccagtctctataaaaaataccaaaattagccaggcatggtagtgtacacctgtagtcccagctactcaacgggctgaggtgggaggatagtttgaatctggaaggtcaaggctgcagtgagccgaaattatgccactgcactccagcctgggcaacagagcaagatcctgccaaaaaaagaaaaaaagaaagaaggaaggaagaaaagaaggagaagagaaaagaaaagaaagaaaattacagagttgtgcaactgtcaccacaatctaattttaaaacattttttatcaccccaaaaaaaggccttcggctcatttgcagtcattctcaattcccatcccaagccccaggcaacccttaatctatttcttgtctctacagctgtaaagacaataataaaatacatggtcttttgtgtctagcttctttcatttagcctagtgtttttggccttcatatatattgtatcatgtatcagtccttggttcctttagattgttgaataatattccattgcatggatataccaccattgtttatccattcaccagttactgaacatttgagttatttccactctttggctattacgtactgataaagctgctatggacagtcatgtacaaatctttatgtagacatatgttttcattgcacttgggtagctgtctaagaatggaattgctagatatatgttaaccacatgcttaatattttaggaaacttcaaaactgctttccaaataatgaaatattttatatatctttttaaaaaacccaaggcttcaaaatctggtgtgtatattatacttctaatacattcatattaagactagccacattttaaatgtttaatagccatgtggggctgaggtcactatggcacagagcaagtgaaagtgtttctgcccagatatcttatctagaatcccaagccaagtcaggataatgtgtgaactaatacacacacacacacacacacacacacacacacacgtacatgctcccctgtgacccacacacatcatgaacacaggcacagcagctccaccctcattactcttcatttatgatttattcatttgcctttacagaatgttgcaataattagattgtgctaaataaatatgctttacaataattcatccatgtcttcttgaaacacatttctcatgggattgaaggtgataaattaacagaaatataccccccaaaatgaagatatagaacctcattaagagttgatggcaaatattaagaatgtggagagacaaggaagattagaaagctgaacatattaaaaactgtgtcataattctggagttctctattatttgtcagtgatgcagaattcagcccatacgcctctgctgggcagacgtttggggctgcttctcctacctatttaatcagtcctactcagatcccaagatgcttggtctcttggctctctaaatttctaataaacagacttggatgtaattctgagtccccaaaaccacctacagagtgagggtcctaaggccatcagatggattcccttcaatatacagattcctggaaaggccgttaaagctcagttgggggctctctgtaccatttcaggcagataagcaaaagtccatccagcacttccagaaacactttttgccctcagatctgggtagacttgtctgaacccttcaaggttcttctgtctgaacccttcaaggtatgttaggtactggatgcatattgactagaaagataacttgcccacctgtgcatgtttataggagtgtatatggacagaaaattatagtctaccctcttaaattttcatatttgacttcttaaaataattgatagattatttcacatttctaaacccctatagtccctttcagttcaattcaggagtcatttatgggtgtccaccgtatgccagaactggaataaatggtgcagagaatgaatgaatgctgaatgaacaaatggtagttcatgccttggggagaaagaacatggatagctggaaacacaggcatacggtcataataacgcactaagttttagaaaatattgcacccaaagatttggctacaggaaaggggaataaggccaactctgcttgaggaagttggaaaagtcatcccagaggaggtgacccttaaatggaccttgaagggtgagcagattccaaggtagagcaggggaagaagggcagagagggtagggaggggtgtgtgcaaaggcttggtggccttaagaagaatgtcgtcctcaggtagcagtgaccagtcttgtgggttgggaggtgggccacagagtaaaccaaagggtcagaaagcagggagctgtaaagataatgttgggccaggctaaagagtttggacttcattctataggcaaaacaaaaagccacaaagctccaaggagaggcaatgaagtcactgggccaaggcctaaccctgagataagcaggaatatatcagcatgaaaccagaaagcctaatccaattctaacagtactggccaggtctaaagttttctgtctctgtgagtaatctcaagtgttatagcacatgccataaacaaacaagtatgtttgcaaatgaaggaaagatcagctcttgattgaggacaatcctgtagtatgtagagatgccagaaagaagggaggactttttacagaagatttagttggtgtcagtcttccagaaaccagaagagtttttaaagcaaaaggaatcaaacaaggaatgcagtgtagacatcactggccagacctggaggaggaaagagacagcctttcatctcaatagaggatttaagggctctcagtctagaggactcctttgccagggcttcgaaagagcgcatgagtataagcttagactctctggagtcaacttggagggagaggacgggagactagatacatgcaaatgtccaccctaacccacaccctaaaatctcaatctccattattactattatgtggcacttaggacctatgtataccttttgttttgttcttgcttgttttcacactatattatatattccctgaggactaggagggtatatataccactttatacatcccccaccccactaatatattgctatatcttggaggtacttacagtctatttcttgacctatcaatgggtgtttccaatgaaagagaatgcattcatgtaggacccttggtgtgaagttttgtctcatgcccatttgttagttaaaaggtcaaaataaaggatactgacctacctctgctatttatgcccagtgtggcaaccttcatatctcttgccaaaagacccaggatctgagatcagtgagctctgagccctgagccctgagaatctggctggaattatttcagaaatcgttctctaagagagtatcagcattcttggctaggttggaaatacatttctcatgaccatttggttcctgagaatcaagcactttcaatatgccttagtgtttctaaatgtgctacttgattatctgctccaggctgcttaagaacagaatttagagcaaggtctcaatttcagagtgatgcttagttcccttattcttttattttttccattaaaaattgttgcatttgcttttttcatctatcagtcagtcagtgaacatctgcctgttcagaacctacacagtactagagaacaaaatatatgtggttttattacacatttgtgtgacaaatgtttctatgcatagacagaccactttctttaagaaacattgtagaaaagagtctgataatgaagctaaagtatttgtagagatatttttgatttcacaagttagtattattaataaaaggagaaaaatcaaaatttggaaatataatttactacaaattgtctggaggagaaatatttacagcttatgacacagactgaatagtgtaagcttataaacaccaaatggaggctacctcatggcccttgagggctagtaataagccttgagaaacctagaaaatgtcatcagtatatacctgtgcaggtagaatattgatcagaaaaccctaagctaaatgtcacttccacatttaaatgaaacctggatggttctcacaggccccactaaaatcaatagcaaaaccctaaggcttcttgataatagcttctgtatttaaatgagagtgaattcatgaaatcacagtggccacctttctatttgccctgccttacctgccaccattcaagtccttatatagagactacaaccttgagaattgattcttgctacatttcttgtatccctcgtcattgaaagttgtcttgacagtaacacaaatcctcaagacagtcttgtttgcaatagtaaggactgtgatgacaataataacaggagtgaacagttcttgaacccttgctgaatgccacacagtgtgctaagcattttacatgggtttcctccgtgagacttctccatagttctacaagagagtcctgtcactgtccctatttcatagacactttagaaacgctacatgccttgtcctacagtaagatcacacagcaagtaatggcagagccaggacttggcataggtggtcagagctctgaacagtggggaaataaccccctaggctgcggcatctcccagataggctctgcagatactagttgggctatcacaggtacaaattcctgatgccaggtttggcttggggtgcattttgaccatctcctcactgagggggcatacagatgctcaggatttcaaatccagcctcttgaatgttcggatccttgagcctggcattttagattgtttctttctacacaagattatacttttaacagtctgaaagacattttttctaccacaaccaaaatttttgtctaagtcatgtttataaatatttaacagttatctttttccttttctttagtcctaaacaactgaccatttttttcactctgttttctcttctgattttcaaagttcaagcatttctgctttccaaagaaattgggagtctgcccctatttatttaccatcactacctgcagccattaggatgtaagatgcaagataccagctgtatcttcaggctcgttcaattgaggtcatttcactatctgcttcttcagttgggcttttgttacagaatttatgaattgaagtcaatataaatcatattcattaaatccaaaccaagggaaggggaaggagagaaaggtggagggcaggggtggagagaacagacatcaatttccacttacagaaatggacagagcaaatactcacagattgactgttcccaattaaacagtcagaactagatttaaatttaatccccatatttccatgactggggagattacccagtaaatttcagcagcccagcctgaggtcctcaaaaaaaactcaaatgcccacagcagcctagcaggtaaagtaaatgagtgaagtgggccaatggtaagatgataaatggccactgaccctcagcctcagtgagggggacattaggaaattgtggggactatggggaattggagagacatggccatctgagggggtagtgttacaggaaaggggtccccatgcagaacccaagagagggttctcagatctcatacaagaagaattcagggtgagtccatagagtaaagtgaaagcaagtttattaagaaagtagaagaataaaagaatggttactccatagacagagcagccctgagggctgctgttgcccttttttaaggttatttcttgatgatatgctaaacaaggggtagattattcatgcttcccctttttagacaatatagggtaacttcctgatgttgccctggcatttgtaaactgtcatggtgctggtgggagtatagcagtgaggatggccagaggccactctcgtcaccatcttggttttggtggggttgggctggcttctttactgaaatgaaacctgttttatcagcaaggtctttatgacctgtatcttgtactgacctcctatctcatcctgtggcatagaatgcctgaactgtctgggaatgcagcccagtaggtctcagcctcattttacccagaccctattcaagatggagttgctctggttcaaacacctctgacagtagcaggtattcaaatccagccatttattgccaccaaaaaagaaacaataggcccaacattgccagatcttccttcccttttccaaatccagaacagctccagatattcaagtggttactgtttcctgacttttaagcattgaagaccaatccaaatctaaaagtcagtgcagaccaagcctttggccaaatgaaaacccatccaagaacaatcaatgtgctctgaaaggctgacaatttgcaagctcttttctaaatcttcttctcccagccttgctattgttttgcaatttagatctcacttaaaatttagggcttttttctctctctagctctaatagctaaggaagtcctaaagaaagctcaatttacaacacaaagttagtgactctttacaaaggttttccctttttccccccacttaatgatatctatgaatataattatgcttaaaatttccagccaaagatccataaagcaaggtatacctttacagtgactatttttgtcacatattaatgaaagtaatactatggaaagctattacagacactcaagttcataaatataaaaaggcaaatcagtaaacttcatatataagatttgatagcataaaattgtccaaattgtttacattaaaaacaaaactaaatggcaaaggacacatggaataatttcttttagcaaatataatagataaagggttaattaagagcctagttttaagaagttcttacaaatcaacaaggaaaacactaagcctccaatagataactgaacaaaaaaaacagacaattcacaaaagatgagaagcaactaattaaagaacatatggggaaatgactcaacctcactagtaattaaagacatgcaaattgaaacaacaaatataattcccagttcagacaggggtgcaatgaaacaggtactgccgtgcattactgatagacaaaatataaagcctcatcggtaagcaattagctaatataaatcaagagttcagttctattaggcaatattgagctttttctatgcgctaggcattgagtgtatgcaaatgacaaaaacccacccctgctgtcaaggagtgagcatgtttcatgagagagacagacacaggtaactccattattaggaggtaaatgtcagaagcattcacacatgtggcaaatgcaggagtaaagccaaagagtttggaaggtatcttagtcgatttgtgctgctacaacaaaatacctgagactgaatggtttataaacaattgaaattttatttctcgcagttctggaagctgcaaagttcaacatcaaggcactgagaccgttagtgtctggtgagggctgctctctgcttcaagatggtgccttgctgttgtgtcttcagatgtcagaaggggctaagggaaaaaggaggctaagctagttccctccagcctttttacaaggcactaattcattcatgagggtggagccctcatgactaaatcgcttcccaaaatggcctctcttaataccaccacaatggaaataaagtttcaacatgagttttggaagagacacatttacaccatagcaagagttttatttgaaatgatcctgagctgaatctggaaggatgattagaatttcgctgaataaagaagggaaataacaggaagagaagatgaggaggctttctcagcatatggcacagcatggatgaaggcatggtgtctacaagaactgtgggggcattgagaacagcttcagaagcaagtgtgaggtggacaggcaggatgggaggctggagagggagcccaggcagcccatgctctggtagtgtgaactttttatcccagaggcagattgagatacggaagcagggaatggatacaatccgatgtttactttttaaaattctgcacaaaagtcactgtggtttgtttttctaattcaagaagtgacagataaaagcaaacaacccaactaaaaaatgggcaagggacttgagtagacatttctccagggaagatatgcaaatgaccaataagcacataaaaatatgctcaacatcattagtcattagggaaatgcatatcaaatcaaccatgggataccacttcgcatccattagtttgtctattatttttttaaagtaatacaacaaatattggtgaggatgtatggagagaaattagaatctttgtgtattgctcgtgggaatgtaaagtggtgtagttgccatggaaaacagtctggtggctcctcacagggttagacatagaagtatcacatgacccagcaattccattcctgcatatacacccccaaaaattcaaaacagagactcaaacatacttgtacaccaacattcatggcaatatcatttacattagtcaaaagatagaaataacccaaatgtccatcagcagatgaatggataaacgaaatgtggtatacacataccatgaccttaaaaaggaaggaaattcagatacatgctgtgaaatagatgaacttgaaaacattgtgttaaatgaaataaaccagacctgaaagggcaaacatcatttgactccaattttacaaggtatctagaataggccaattcacagagacagaaagtagaatagaggttaccaggtgctgaggggagggattaatggaaagttattgttaagtgagtacagaggttttgtttgggatggtgaaaatatctaaaattgggttgtgatgatagttgcacaacattgggaatgtacataatgccactgaatggtatactgaaaaatggttaaaatggtacattttgtgctgtgtatatcttatcactgtaaacagtatttttttttaagtagcaggtgttttggaaaattcaagaaagtgtaaagaaaaatattctaacctccagagttacccattttacattttggtgaattttctcaagttgttctgtgtgtagagtcatatatttattagattttgctagactgaggtcacactatccatgctgttttataactgcctctctcttctaatgagagcttatgaacttcctagttgtttatacagcatggtggttaaggatgtaagtcctggagaaaaaccaccagggtttttttgtcttagttctattgcttactcagttatcagctttgtggctatgggaggtcacctaaccctctaaatttgtttcttcatctgtgtgaaagagacagtaataataataccaagcacatgcatagttcaggattaaattatatcctaaatatatatataagcacagtgtctggtactcagtaaaagaaagctattgttattaatatttaaaaatcctcacctattcttccagagaataattttaatgactccatgaagtactttattatgtggatacaccatactttacataactaatcttatgtattgaacatttaccatttctaaatatttactcccgtaaataatgctgggaaactttgcaaacatgtctttagaaataactccatttctttaaagcaattcctagaaaggaaattattgggtaaaagaatatgcacagtttaaggtttttaaactgtacatattttggtggactatcttccagaaagagtatgatattcacagaagcaggagaacaactttatcaatagcaagaaactggaaacaacctaattgtttaaaacaacagattaaatgtgatgtccagttattggactattacacaaatatttataaatatgtttgcaagtcctacataaaaacatagaggatgcttacgacaatgttaagtgaaagaataagagaaaaaaatattttaaatttttaaaatcctatgcaggtggtgaaataaaaaaccaaaatggaatggttaattggtaggactacagataaattttttcttaccatttcttttctaaattatatttaatgcacataaacaagattgataacaaaggaaaaataattttcctgggaaagtattatttgtccctatatttgaaagctttcattgagatgtagtctgacattgcaagtagaactttaaataagcacccatgataacaaagcccaaatttcaattttctggttgaaaattttcagatacaaagtcaccttcttcagccttatctatgtattcaaaaactgtagagattggagatttctgccatatagtgttggaatcagcaacaagatcagacagccattatttctcaaaggaaatgaatctaaaaagactctagaaataaaagcaatataccatctctcaaacagagtccagctgctttcataaaggccaaggtccagggaaaggctctagctgtctagtcatcttcatggagctcctgggctctgggcccctcagtctacaccatcttgagctgataggcaagttaattgatatctccgagtctcagttttctcaactaaaaagtaggtttaataatcatataactaccttacagggttgttgcaaattaaaatgcagtaaaccttgcaaaatgttaacatattgctcgggactaataggcactggataagcattagccattattattattatcgtcatacactagtttacttgctgttgttaaagataagaacagcaaggcctagggagatgtgacttgtcctagtttagcgggaagagccatagatttgtaaagggacctgaattgtaatagtaattgaagcacttttttatccaggggcttagggcaagatacttaatccttaaagtagtgctaatagaaatacaatatgagccaaaaatgtccttttggattttctagaaaccacatcataagaagtaaaaagaacttcattttaataaacatttaacccaagagatccaatattttcattttgacttgtactcaatataaaaattattaataaaacattgtatgtcttctgtactaaatctttgaaatccagtatgcattttatactgatagccatttcagtttagagactaaattttcatctgaaatacttgagatgtattttataaaatttattcttggaaaatcatattcacatacccaagttgttccaaacatatttttccaataactgaattaagtttcagtacttaaacttaaattaattaaaattaaataaaataaattcagttcttcagtcacgtcagccacatttcaaatactcaaaaaccacatgtggctattggctgccattattagacacacaactacaactggggatagcatctatttcactgggttgttctaagattgcatgagagagttttacaaatcataaaacgctgtccaaataaattacttctcctccaaggtcacccaactaatgagaggtggctcaggaacaagaatcaggccaatgtgatttccacatatggacatttgaaatttgaacactactcatcttgaacctggctttcaatctttttaaaactgtgattcacagtaagaaatatatttcacatcacaatgaaagacacatacacctgtgcatgtgtgtgtccgtgtgtgtgtgcgtgtgtgtgtgtgtgtgtgtgtgtacctgtagatcagcagccactgttatttcccaaaagagagttacaatgaggatattttataaattaattctgcttcttcctcctgctggtcttctcctcctcctccttctcctcctctctgtttagtgctggtcatgacccactaaattgatttcatggcccattaatgggttacaaaccacaagttgagaaacactgatcttaagagtccaaacttcaaggcattttaaaaattgatttgttttatgttgcaaagagtaaccctctgtagccactcgtcataatgttcaaaaaggaaaaacatcccccccaaggtaaataagaaatatgacactgctttagataagatataagaaaataagtgagttgcccacttttttgttaaatattattaatttattcattcagcaaatgtttattgaagaaacactgtacttggcattgcaccaggtactagtgagccccggcccaagacaggcgggatccctgtgcttatagaagttcagctccaaaacaacagaagccttcgctgcgatgacttagccagataaggatcttgggtgttttgctgtgtgtttcccacaagaagagcggagacaggcagttcagcactggcatagatatccaatgacaccattagtgacttaactcttttttttttttttgagaccgagtcttgctctgtcgcccatgctggagtgcagtggcatgatcttggctcactgcaacttccaccttccgggttcaagcgattctcctgcctcaacctccggagtagctgggattacaggtgcacgccaccacgcccggctaagtttttgtatttttagtagagacagggtttcaccgtgttagccaggacggtcccagtctcctgacctcgtgatccgtctgccttggcctcccaaagtgctgggattacaggcgtgagccaccgcgctcggctgtgacttaactcttattactttactagtccacatcccatgttgtcaatccctggttacaagacagctgccacacctccaggcattatgttcatattctaggcaagaaaaagaagaaagaagcagaaaggggaaactttccccacagttccccgcaccagagggctgccagataaaacacaggatgtccagttaaatgtgagtttcagatgaacaacaaaattgttttttagcataagcatgtctcatgcgatatttaagatatattttcactaataaaattgttcgttattaatgtgaaatgcacattgaactgggtgttctatatgtttatttgctgaacctggcaaccatacgagcataattctgctcacatttcaccaccagaactgtgtcacatggctgttcctatctgcaaggaagcctggttaaatcaagtcttttttttaaacttccagtctcaataaaagaaggaggcaagagagaaggaagttggttggggacctgagtgagccagcctatgaaatccaccgcagttcagttcccctctggcctttcttatagatcatattatggaatttgtttttgtttttgtttgagacagagtctcactctgttgcccaggctagagtgcagtggcacgatctctgctcactgcaacctccgcctccctggttcaagcgattctcctgcctcagcctcctgagtacctaggactacaggcgcacgccaccatgcccggctaatcttttgtattttagtagagatggggtttcaccatgttgcccaggctgatctcgaactcctgagctgaggcaatctgcccacctcggcctcccaaaatgctgggattacaggcatgagccacctcgcctggccccgtattatggaatttctgttttaatctgtattcagtgagaaggaattgaagagtttaaaagaagggaaggataacctaaattaaatgtaagaagatggttctgacttctgtgtgtagaatgtatgaggaggaagtttagacctgaagtgaaaagatctgttagaagcctagaacattctagaacctttgagaactcagcctagccatcttgccatgcagatacctcagcttcctgcatgtgcattgactcttccgaaaaatgaagaggaatgggtgagaggcccatgggtgctccatgcagctctcccagagtggcagcaggtgacaaacagtgatgcattctcagcttccctttgcttctcagctgcatggcttggttattaacatccacccacgttccatgctccttcttcagcagcgggtatctgagaaccacagtagatggaacatcagaacttgttataataaggttgagattttatgagactcctgcaaggaaatgggcaaaaaattgctttttaaaatatttaattaaaaaaatcaatggaatgcccagagaaagcaataaaagccgctacctcttagcaaaaattttaaaagtaacatagaagatgtttatcccttgacatctgggacttaaagcaaaaattgaacaatccgattccagagctaaaaaacccacgtgggaaagggaaaacctgactttgtgcttctctctctctctagtgggttttgttccactgaaggcaccctggtcgcccagctccctcccttccgtcctcctcctccagcaggtgcttttatctctccttcctcctgtttctcattgaattaaatcaattctttagttttcattttgttcccctttctccttctagtcagatcaagtgcttttctattttccttgaggattaccaaaatgagctcttagggaaaaaggatttctcagcactttgtcttctgtttctttctatttatttgctttgccttttattatctttttttgctgacaccccagggcacgcatgcagtatgtagagattattggctctgccccttttttctaaatgaaatccattgatgtaaaagaaaaaaaccacctttgtgtctcacctaaaaatgaggtgagatctaacagggtcagattttaacagggtcagagatctaaaagggaatatataaaaacgtactcctccacacatagacatacatatacatccgtacatatgtgtatgtttatgtgtatccatctattgatgtacacgtatatacgcacacacacatacgcgtattttactacacacacacatgagcataaatatatattatttctagggaacttctgcctcagttaagtaggacccgaaaggttgttttgccttttcagtttgcagaggctcctaattgtgcaaattgtactactacttctaggctacaactaactcattatcttaagattaataatactatcaagaaaaatcaactccctctactccccttctctctcttaatgaacacacttggtttttctaatgattcagtctcaaaaacgaataccatttctcttcaaagtgcttccgaatgaaggtgcagaaaagcaatacatgtaagtcctggtggtggagagtaacagagctaattccaaatatttgacatcgagacagagggagacagtaaaagtgcacagggactgagtgcccacatggctcagctctgctatggaagccaggcatagcccttcacccactggactgtttcctcagctgcaaggtgaacaggttggaccaaatgatttccaagagcctctagagctttgaagttctgtctttccattatctcaatattaggcaaagcatgccaatgagcacggtcccacctcctctttattctaaatgtcaaaattctgctctaacaactaaaacatgagttgaggctacacaggatagtagaattcaagtttgaaaaataaacaataaggagcctctttcagtggccccagtttgctttgaacaattcataagaccacatgaacaaaggaaaccctcaaatactgctcagccatggtgaggccatctaagccctgtgagtgatttcaaaaggaggacccactgtctgggtcccacctgcccatgcgttagtctgtgacctctggggacagtcagaaagaagagcttgagaccagctgctgggcctgatccacagagtggtgagagtgctgaaaagtgaaaggaacatctgcaggcatctggggaccaaaccacagggcatctgactgaaacaccttcgtagatttctatcatggacaggcatatacccagtgagtgttctactggacagaagtctggaaaccttgcttctaattgcagatccaccaccaatatgctgtgtgaccttgggcaagtcctgaacttctttgcttcttggttttctccccagtacaacaagcgattaagctacgtgacaatcatgtttatgtctagttacgacattctgaaagccagatatggaatgtagcatttttaagtctcctcaggtagcgagaccagtgcagtaactcagaggaggtttccaggagcgtgattctgccagaaggagctgaggtcttatgaaaggacagtttgaaagtcagacaagcagaaaagacttgagagatgatacagatatagatatagattagacatacacatagatatttatatagatagatatggataaggatatgttgtttctcctttttttccatgatttcttcctttcctattttctgcaaacggtctttgcagcagaaatagattagaggagggtatccaaagtgtgttccatagaacattatacacagtaacaaaagggttctgtgcacaaaggagtttgggaaatgtttcattttatattccactcttgaagagccacaactcttattggcatatcaaggctctgagaagtcttcagtgaaagagcctgtttacttcttgttgtacccaggagtccccagactcattcgcccacagagccttctcataatacctgttgacatccatggggctggtgttctgcggaaggtactctggagttggcacagcattattccccaacactgatatctcggggcatgcatctgggtgaggcctgcatgcattacactgcactccttctgtccagattccaacccattaaacctctgcttttccttagttcccacctaacatgagtggcattgtgatcaactgaaagagtaatagcagataataatgatttaatagtttattgtactatggacaattagccaatgatgcctggatcctgtttgattgattgagatggaaatccatccatccatgcatgtgtgtatttatgttctcactcagagaatatgattaagaggcctctggttcagaaaagtggattgaacatttgtctcctcttttaagatcccactgaagttatattaaatagagaactatcaacggaggaacaaattctgaatagcaaacagagcaggaggggaggcatgagcaatttctagagcacatagaggagacagaagctgtccatggaaaaacaaagtggccagagcccagaatgtgccaaaaaggtttagaatagaggaggtgtcctatctgctgagagtgcaggtaaaagatcacctgaaagaaaggatgaaggtaaagaagaagaatggaaatttctctatggttaacccagatggccttcattcctttttcaatatcattttcccaaagcagagggtagcaggatgcttaaccatagggctaggaaaaagcctctaaaacttcaagtggagtgatagacttatggctgctagtgggagtgttcatactcagggtgacgtgccctttgggctggcactgggaagcagtcacctgcaaaatggcttgctcctgaaactgtccatcaggcaaattatgcataaaggacaaacaccatctgtacacatatagctcctgttagcctccctagtctctcctgtttaaatgtgagggactgatcaatgatcactcaacatgtgaataatccagcagcatgaaaaagaaagatcatgcatagcaagacagccttttcttgccatatgtttcctcccctcacccttccataatctgctgccacctctccccaggagctccaagcctctgttcatttctgcatagtataaaaacttctgtcctctggtccttcaagtctcatattttgtgtggctcccatgcatttgcacataaataaatttatatgctttttcttctgttaaaagaagaagaaaagagaaaaagaaagatcaatatatataaaaaaagctgaccccagagaaaacaaagataaatcagataactaacagaagctaacttgaaagataaatctcttaagaaagattcaagattaagcatggggtaattaaattatcagagaaataataaaacaagatttgctagagatgaaagaggcatgtgttttctgattgacagaggccagcaaatgccacggataaatttttgtacagatctgtagctatatgcattgcaaaatgccacggatgaatttttatctagatccctacctagatacaatgtattgaaattttagaactttaaagttaaagaaagatcccaaaagcttccaaataggaaaaacagatcaattacaaagaaattacaaataaaaccagcgttagacttcttcttagtaacactgacactagaaaacgctgaaactaggtcttcaaatttttgaggcaaagtttctaatctgcaaaccataaccagaaaagctaccaaccaaatgtaaagatgaaataaacatttcaaatattcaatgattcactaagaaatttccccctgaagaagtttcctgaggatggtgggactaacataaaagtcccagtgaaaagaaatttcagaataatagctgtaccgtaggcccagaaagcaactgatacaaattaaaagaggaaatcagtgtcttcaagacgaagggagtaattttttcaaggagtatatggatgtgttagtgatatggtaaagaagacagatataaaataaatagaaaaaaatcagctagaaattcctggaaagacaaactgaaaaaaaacaaaacaaaacaaaaactgattctgtggggaccgagggaaaactttccctttgccctccctctgaaggttcatggaaaaattaacccacaaagggcagattaattggagaaaaagcacaccaatttattaatgtgcacacaaaggaaagtcacagagtgattaacccacccctcagtgggatgcagaagcttatttgccatcttgaagttacaaaaagaatggggacttggagtatggccaaaacaggttatagttgcaagacaggttatgggaggaagggaagaggaggcttggctagcaatggtggtcttgttatgtagatgaaatctcacggtagcagctttcaaatagaataaataataaatgtatttttcagacttttaaaggtatcaacctctccgttaatttttcctagctctggacaagggaagagctggttgcatcagtgcagattttctacagatgcaaatctgccccacaaaagacagctttgcaggaatacttttgttttctgactctccaagcagccatttgaaaatatgtcaaatagatatagtttggggtaaaatatttttatttccttcagtccccactttgaagccttaacaagtttcacatgtttggccatgtgtggtggctcacacctgtaatcccagcactttgggaagctaaggcaggtggatcacttgaggtcaggagttcaagaccagcctgttcaacatggtgaaaccccatctctagtaaaaatacaaaaattagctgggtgtggtagtgagcctgtaatcccacctactcaggaggctgaggcaggagaattgcttgaaccttcatggcagaggttacagtgaactgagatggtgccactgcactccagagcaagactctgtctcgaacaaaaaatgtttcacatattaaaagccaagttgatagctttggagaggtttgggttagagattattagagatagacaaaagagtggaaaacaaattgggatatgcagaaaagaatacatttaaatataccatcccatctctctttaaatcagtcttttagtcctgagaatagatcagtttggttaaacagttgtgtcccattccaggaggtggcattgcaggtaggctaggctctatatatgatgcaggcaaacagatcataaataaaaggtatttctatggaaacagggaaaaaaggctaatgtctggaatagtctataaactactttttttttagagtctctgaagcatcttcagatttcagtgacaatctgacacatatttctggattgtagtttgaattgggtgtttaaacgaactttgtgagttcatgtattactggctgtttatatataatttgctgtggtaatttttcttgaaggttatttaagtggcctatctttagtttgcagggttataagaaaagcacagttttaatttctaataatttcaagttagaaaaatggaagaaaatttgaaaatgttatttttggagacttgtagccaagaaagaagtcaggattcagtctacattgtgagaaaataataaaaactcaaaaataatggacaaggctggaatctcataacagagttatgaggagaaaaacctatagggttttttttttttaaaaaaaaaaaacataattcttctctttagtcctttatttctaccaaagacaaataatggtatgacaaacttatttgcaaaataagtattagtttgataatatttggcctgattattcatataaagcatagcaagaacggtgattggtcatagaggctcttataagttagctttgttggaacttttttacaaggaatctaagattagactttttaaaacctcgaggctagaaagccaagccaaggatgtgccacttatctatatctgtaatacctgtacaaattgggtgaatttttcccttctcaaggtcttaaaatatcttgaggtttctgggcctgtcagaaagtgacatcttttacttaccacaggtcaggaaccctataaagaaactgtgtagaaaagatatcaggtcagactttttaaagggcttcttatcagctcaataaagccaatctaaattcctcaaagcagtctgatcatatttgaaaatataccatttcagtcaaggccttggtaaaataaccactatatccaataaccactatatccactattaactactatatccactattttgtcctacaaaagaaaacagattctaactgaacttgcgtaaataactatattgccataaattaagaatactcacaacttttcaaaattctggagaaatcaggtaaagaaaaaactaaatgttttaattttgctcacaaaactatactttacccagttgttgttgtaagctctaagtagctcaaaagaaaaagttttcttaactttagacaataaagcataaaaagaatcaacaatgtttcaaacaaaaagaagtcattagaaattattttagtcctttattagttcagtcccatgtaattaattcttgtcccacttgatgttgtgttggcaattttcatgaacacttcagattattaaaattagagtcttgaactttttttacctagtcgaatgatatgatctaccctgtgctcaagagaacctgtcagagtcctttcaatgaattaccttaaagaggaagcaaattttggacagtagctgattacaaacctttttttgagaataatcaaagtaaaacaataattgtctgtagattaaagaaagacagaaatagctatacttaaagacacaactggcaatgaaatttggttatttttgtggcacacgacaatttaacataataatcttaattattgctgataacatataccaagacttatttcaaatatgagacaaattaaaatgtgccacaattttgacaagtaacaatgcaagagagagaattcatttgatcctgatgctggaaatatatcctgcttggagtagaatgcattcttggatctatagagaagattataaatataacccttattcactgcagtgagaaatatatagccatcagtataaaagatctgtttattgattttccacacttagcatcaacctataaacaaaacacaaaatacttaatcattcttacacaatcttgacaaggtaaaggaaaagtacagctgatttgggaggggggtgtggaagagaaaaagtacaggaaagggcaggaagactaaatagcctcatctttatagtgagaagagtcaagtgatactgcctggagctgttggaagaagtcataaatatatcacataaagttaaaaacgtaaggtgtagaagataatttttaaaatcaagaacattttaaaaatcaagaattatgaaagagatattgttatttttcttattgtcctatccatgtctaaagttgtcacacctgcaaggaaaactatgattataatatttagaattatgaaggcagcaacctaaagaagttagaaatccttaaaaaaaaattttccagtgtgtggaatgtggtcaggtggagcagaggttagaggctgttttaaaaaaaattataagcaattctgtactatttgattccttgtcatgtgtattagttcatgcttgtgtcactgtaaaggaacacctgagtctgggtaacttataaagaaaagaggtgtaattggctcatggttctgcaggctgtactggaagcaaggcaatggcatctgtttcctgagtgagggcctcaggaaacttacaatcatgacagaaggcaacaaggagccagcatgtcacatagtgacagcaagagcaagtgaaagagaatgaggaggtcccagactcttttaaacaaccagatctcacataactaactgagcaagaactcacttatcaccaagggggttgtattaaaccattcatgagggatttgcccccatgatccaatcacctcccaccagactccacctccaacattgggaatcacatttcaacgtgagatttggagggacaaacacatccaaaccatattatttcacccctgccccccccaaatatcatgtccttacatttcaaaatatgattatgccttcacaatagttcctcaaaagtattaactcattccaatattaacacaaatgttccatgtccacagtccaaagcctcatgtgggactcacctatgtgcctataaaatcagaacaagtaatttacttctaagatacgatggtggtacaggcattgggtaaacattcttgttccaaagtggagaaactgaccaaaacaaaggggtaataggcatcacacaagtgtggaacacagcagggcagtcattaaatcttaaagcttcaaaataatcttctttgacaccatgtcccacatccagggcacgctgctgcaacgggtaggctcccagggccttaggcagctccacccctatgactttgcagtgtgcgtcctccatggctgctcccacagattggagttgagtgtctgcagcttttccatgctgaggcttcaagctgccagtgtctagctgccagtgtctctaccattcttggatatagaaggcagcagcccccttcccacagctccactaggaagtgccccagtggggactctgtgtagaggctccaaccccgcattttcccttgatatggacctagtagagtttctttgccagggctctgccccagtggtagacttctgcccatgcctcctatggcatttagatgggagctgccaagccttcttcactcttgcattctgtgtgtctgtaggctgaataccacatggaagcatggcttatgttatccaaagtggtgtctggagccgtacctgggcccttttgagccatggctagagctggtacagccagaatgtaaggagcagtgtcatgaggctgagcagggcaacagcaccctgggcctggcccctgaaaccattcttgcctcttagcctcttaggcctctgagcctgtgatcagaggggctgtcccaaatagttttgaaatgcccttgcgatcttttttttattgtcttggatattagcccttggctcccttttagtcatgctattcgcttagcgagttgctccacaggccacttgaattcctcccctgaaaaagttcttttcctttctactacctgagtagtctgcaaattttccaaacccttacgctctgctttccttttaaatataagtttcaagtttgtcatttctttgctcccatatctgatcatagactgttagaagcagctagaccactcatgaacactctgctactgagaaatttcttctgccacataccctaagttatcactcttaagttcaaccttccacagatccctaaggcatgaacatgaatgcagcccaattatttgctgaggtgtaacacaggttacctttattccagttttcaataacttttttatttccatttgatacttccttagctttgtcttcactgtccatatttctatcagcattttggtcaaaactatttaattagtctctaagaagttccaaactttccctcgtcttcctgtcttgtgagcttctcccgcccaaattcctccaacccctgcccgttactcagttccaaagttacttctatattttcaggtatttttatagcaaaacaccactcattggtgccaattttctgtattagtccatgcttgtgtcactgtaaaggaatacctaaggctgggtaatttataaagaaaagagatttaattggctcatggttctgcaggctgtactggaagcatggcaatgacatctgtttctagtgagggcctcaggaagcttgcaatcatggcagaaggcaacaaggaaccagcatgccacatggtgagagtgagagcgagagagaaaggaggggaggtcctagactcttttaaataaccagatctcacataactgagtaagaactcacatataccaaggggatggagctaaaccattcatgagggatctgcccccatgatccagtcacctcccaccaggcctcacctccaacactgggaatcatatttgaacatgagatttggaggaacaaacacaaccaaactacatcaccatgttaccatcatatcaatttgatttttaggatcattgagtacctaccatgtggcaagcattgtgttgcataccagacatttagaggtggtagcagccttatagcagaagcatctaagaaacaaatgatgctagtacaggagcccttcctagggatgtatgtgtgtaaatcgggagagaggaaggcagggcagggaaccacagcttacttccttacatcttagcgggaaagttcatggagtatttggccaatcgattaaaactgttggtatataaccctcagagaggtgaattatgagaagaagagtttaggacttgggggcttggagacttgactcaatttctttagattaataatattctaggcaggcagatagaattactgacagtttggggctgtaagaatccttagagagactgtatccaacacttcattttaccaaggaaggttggtagtagcagagctactccagtttagtccttctgattccaggtttagtcctagatcaaaggaattccagactaagacacctgtcaacacagggaactgatttttattacatacctaccttgagcaggcacagtactgcctacttgattcatgttatttaatttaatcttcacaacagccatatgaggtaggctctgcccatattaaatttgagcaaattaatatttaaagtgtttaaataatttgtctaaggtcaataactgaacagatacaaaagagtttgacctctaagttcatgacccttgggttttggcccataatgtgagccctgctggttgagatgagagcagcacattcctacactggtgaccagaggtaaaaataaaaatcatttcatatttaatcattaaacatatcaacaagatgcataataaaagaaacatggttgtggcgctgtatgagcagagctctttgatctgcctctccacacccccatggccacactgggtgaaggtctgtgtgctgctagaccatccttcttagttagaaaggaccccaggagactttgcctagccccaagctatcctgagcaaaataaatagaaaccaaaaagagagagaggagagataaattcttactgactttaaaagatttatactgacaatatcccaaggagcttatgaaatgtattttttcccttatttttggtagaggaaagctgctgatgaagagatagctctcaactatagagttccattgagagtgaaaataagctcagtcgcttattgatagtccggttgcagaaaataagattcatataaacatcatctcacatattagaactggaaaaatcttccagtcagctttgaaagggttccattattgaggtgccaaatttcggggacagaatttacatgcatggccacacccaagggtggagaggagcagtgacacagaaagagcccctagtccaatacctcaacaccttcagctggatttttgagcttctcatgcatgtgcacatgtgcatagcagtaatcttcctgagaagaatggagatactttctttattttgcccccattcttcccttcagtagctcagaaaactcctggtttctactcaacattctgccaacctgagaacatcagagaatggtctcagaccaggacacagttgctgctgctcccttatgtgtaaattattattggacatgggactgtcttcatcctaaccccaggccatacccccaaagagtctggagcaagactctgtccccagagatacttccagggtcctcacgtgctctgcacagatacacactaccctagtactggaaaccccagtcatccaccctcaacacattgcctttgcttacaacagtaatatagcaaacacttcgaatttgcatttagtcacattcttgcccttgtgtggacttgtggtgcaagatgaggttgggtcaatattaattccctcttgcccccaccataacagatcagttctcctgctgcaccactctgatggtgccactcacctgctcaaaatatctggctctctattatccacaaaatgaagctggaaatcttcagccaagaagcaatgctctctgtggtctggttacacctcctatctccctggccctccttatttctcagtcttctctccagtgtcctactctgcagccaaacatcatctacctttgtcctgactcctcttcccttcaacttttgcacagtccattctgccagtatctttgtttttctctccctgtaagacctggctcaagggtcttcctctttacggatcttcccacctggacctcctgtctcctccttcctgaaggctcccaacatgttttgcctggatgtgtgtctgactttatgacctctatttgtgctgatagttcttgcagacatctgtgcacccctgccagacctggagttccttgaaggccacaactgtgtctgtcacatctatgtcctcagggcagagccagtgcttggatgtttgctcaaaataggcatccattaaatggaatctgagggcagaaaggagtaaggaagggaccgaataaatggatttggtctggtgtccatgtgcctctcattccccttcctgcccctctgacttccaaagctatacatcctggccacaagttaccttggccatgttttaggctgaagtacacagtgggccagtgaaaaagaaacaaggagaagagtactgcttagaagtccagaaatctggagtatggtcttaactttcaaactaagactttggacaagtcatttccctatctggatctccagtctgcttccctaggaaagcaagaggactgaattagatgatcttcccaattctttgtctttggttctaatcccttttcttttcctctgtgcccatgataagaacatttcctctgctgcaaaatactgtcataatgtagattatttatgacagttgtagatcacttttcttatatgccatgctgaagcttcccaacaagtacagagggttcacgttctcgatccagctcagacacggtcttatgcttcatcctgattttaaccagaagtcgcttttacttactttaagaaagttggaaacctccaattcctggaacaacaccttccttttgagtaatgctttgccttggtaggaatccccctcttttatctgcaccattgtttattgcaggctgctagtttatttgcctatttgggaaactgggttatctgcagaaggagaccttggaagtgccaggagtagtttaagaagactgagtactcattagctgcttcccactgtggaagtcagggatcttgttgaaacagatttctactgcaaaaggagcagcatctaatggcccaaaacttcaaagcagaagtgagcaagtaaaattaatgtatcagaaggaatgcctggaacaatataatggtggtgtgcttttacactgacagtaatccccatgaatgtaggtttctcgcaggtcatttggcctgtgctactggaatcaagattggcttgctccagagggaaactctgccatgggcacaacaacaggggagatttgtagggctttttctgtggagaccagttgcaagttcacatgactcataggctcaagagctgaaatgaacattaagagattattgagttcagccaaccctctcaccccattttacaagggaggaaactgaaacctaagaaagttaatgcttttccaaagatcattcaactagtaagggaaggaacaagagtcttttgaaatagatgtttttattcctgttttgcagatgaaaaatcgaaggctctaggacacagaagtaggaagtaggggagctaaggttcgaaccttggtctgcctgattataaggcctatgtctccagccactgtccacctgcatcaggctatactatttacaaagaaaatctaagaatggaggaagaaggctgggtgcatgcagagaaggagataatggcctccagtatctctgattttgatgccatttgtctctaagtcttgccacagagctactgctggtcttacctgaacacatctgcagattcgttttccctgtctctttccaggctcctttctccttctcaacacctcagctgactccaagcacaccatcctgagtccgtggatgaggagcagcagtgagcactgcacactggccgtctcggtgcacaggcacctgcagccctctggaaggtacattgcccagctgctgccccacaacgaggctgcaagagagatcctcctgatgcccactccagggaagcatgggtaagtacttctccatgtccaaaattgattttataccaggtgatttggcttttggttacacatttccagagtctgtgacatctacttacaaactcatgattgtcctttaatcggtaggtccaggttgagcaattactactaatatcccttaggtagtgtcttgggtactgatttgtgggtccctctgacttccctggctagtggcccttccagaagccagaggaccagctgccagagtggggatttcatgagtgggtgttaaagatgttcatttcccaaagttcagatacagccaagaagaaaacagtcaaagaaatgttaaaaggccagaatgaaagtaatttaatatggtagaaactgggttttaccagcagaagttgggcaggaagggaaaggacaaagtactttggccatccaagcgggttctatgggagtttggtaccccagagcaggattagtcatggatactacgccaatgtaattcagtagagattggaacagagctttgtgctacaaccaccaagacatatgacagtggaatcctctaagctttctggagatacttgcttactcagtgatccatcaggcctctgcggtagtgacattggaaagcaaacttaaactagggcacttctgtgcctggcttttgtttttccattccataagtataaataccatcctatgacctcagcgttgagggaccccagatctgattactttagcaacaaggatccttctttgtgacttgtttacaggagaaaaagcccaactgtctagctatgcttagacttggcttccttctaagagaataccttttcagaagggtcccacctgaacgataactgttacccattgtccatccccatggtgtgcaggggagagatcctgcctgttgctttggcaataaggctgaatggcctccttcgtaatttcttgaaagtcttctccccactcccagccattaacccatctgtatttagttgcacttagaaggactacaagctgctgcagtctcatcaggaatgaaatcttgacatcaaaaagaatgctctccccattcctaaactcatatccatcttcttgcctctgaaatgcctctctgggctggctgagaaggtcccagctaccaaggactcttgctctattcaccagatatcagtgtggcatagcaggtgtctgggctgccccttgtttgggaccagctatcttctggcaccaagcctccctccagcacggcttctctttccagtaagaagcctggatgggaagacttcttatctgagggcagggctatgtgccatcctataggtatttgcccagcctcatattctgagagctgcatattctgacttatcactctcaacattccttccttccctaccaggactggcagagaccagggagtgctgcttgaggcttctgagccctcaggcatcagtccattgtggtgctggtggcgggtgggaggattcactgatgtggctgggagaggtggagttggagtctgagaatacccatgagtgtgagaaaaggtgccagaggggtttcagcacttcttgtgtggcctggcctgtttccctgtgtagcatagtcaggaaaataactcctcgggtatgactggccatagggccttgcaaatagtttttccctctttacctttctatgctcatataggaagtcaattctcatttaaaagaggagaaaactgaggcagagagaggaaataggaagtgatgtggtccaaactggactctttccaggagacctgaagcctcttagggagaaagggtggagttgggaaagagaaagggaaatatgaaagaatcttgcaaaaaaaaaaaaaaaaaaaaaagagcgattattttgattatttgatccttcaagacaaatgagccctgggacttgccatgtcagtgccttcaggggcagccttccctccacatgatgccatggtcacctgcctcaacgtccacctggccacccaacttatcctcttcccaaggcaatgcctccatcaccagaggagctgctctgtcctctggagggtgtgagttgagcaggagagaggaattgggactgagctgaggcaaattcagtgacttgatggctttgtctggggcagagtttagtgatgagctggagtgattccagatttaaagatgcctggaccagcctcctcacctcccatgagatctgtgtggtgagggtagaaggtggcagcagaaaggacaatcaatggaccatccactgcagcgcagagctactcttgtgggtgccttggccagctgcaaggaacagggcatttgcccagcaaatcaaaacttgcccagctttgcactgttcagagtttgggatcacaaaggatggagatttgcctgctctctgattatggggtcgctgctagtctcaagaatctttggatttgcagtactcagcagtttgccttgccgaaagcttgctctgtttaatgtcagagatgacctcactagcatagtgctcagagcagcgagggggacacagtgatatcctggtgatgttgaatgtgatgattacgaatggggctggcttcctctcataacaggagacggtggtttggggaccactatttggaaaacaacattccgtgtttgtagtaacgagggaggaagttgtaataataaagtcggctggggagagcctgactcagaggagtgggctgaggaatgacaagtcagacgccaccaagttccccggaaaccactgtgtcgtgagcaggtggtgccggctgtcgtgcacgggtggggcaggagcagcagactggttggaagcacccggaggcagaaggcaggggaaaggcagttggagaagcacagcagctgctgccttcctggttgcctggaaagcagcagagtatatgaggtctaatgaatcacagagcatgagtggccacgttggccaaggctgccgggctttggctggagtctcgcaggggacagacagatgagtgcccagcctgctcatctgcatggccagaatgaccagagaagcaaggaagcagagaaataggggctaccaaacagcctaggcccggctgatcacagagtcacataggcataggacatcttagctagaaattagtggccataaagtccccatgaactgaatgaataggataatacttatgtaaaatggtgagctgtgaaatggcatatggaaaatggctcgcacagtgcctggctatcattggcactaataagtgctaggtccttttgggttcaaacattcatctcaccatcatggattgagtgcctcttgtgtggcaggtgccaaagatgacacagccaaagacaacaaggtcacagctttcaaggaacatctagtccagtaaggaagacacaagcagaatagcaacagcacatgcttatgtgaatgttttaaaattgaggctcgtattattaagaggctgagctaagatcgctagtggcagatccagcagaagcagccggctagggagccacccactgcaccacactgccattctgatgtgtctcagaagatcaatccagcagcaattgtctgtgtaaaattggtcctctcccggatgcaagaacgcaagcttgatggtgggtggcgtgtagggctataggagacactctccagggctcctacccagaaggccacctcgtgtcttgtttcctttcgaagcacatgactttttcccacagcagcgggtatctggggactttattatgtatgaccagaactacacagtgtgtggagggaagaattgggcctcaaggggatagaagttgccaatcatttggattactaatacttgaaaagatattttaaaccggaagtcgttgaggaaactcaggcttgagccaagataagctgtcagggcattttaaagcacaaataagcctcagtccagagggtggtggtgaattgaaattctcagcacaaagccttgcctttctgcaggacctcaacccctagacccggaagatacgggagtctaacctcctcccctttccatgttggtttcctgatggggaacatgaagcccaggcgggtgatgtgatgtaatgtgacgtgatgaaggtcaaactgcaggctcagacccggcacaatggctcacacctgtaatcccagcactttgggagaccaaggcgggaggatcacttggggccaggagttcaagaccagcctgggcaacatagcgagacccccaacctctacaaaaaaaatatatttttagttagccaggcatggtggtacatgcctgtaatcccagctattcatgaggctgaggcaggaggcttgcttgagcccaagaggttgaggctgcagtaaactgtgatcatgccactgcactccagcctgggtgacagagcaagaccctgtctcaaaaaaacaaactaagaaacaaaactgcctgctcgtggcaaagccaggactcatctccacagtggcaccctggaaaggtctgtttcccagctgcccagctgcatcaggaaaccctcaaactcactgcccttagattaaaatctgcagccaccctccccaagtgaagaaaaatttgcattcatgctgggtacccacacagctgccgcgcttacttaaggcagtcagttctgaccaaagatcccagctttaaaaccagtagcaatcctaataggaaatgtgccaaggtaatttaactcaaaaagatattgatttgtggccatcaggaggtatggtttcaatcctgattccaccgctaatttgcagcatggttatggacaaccacagtattgcccagccgtagcttcttaccttctaaagtggaagctctggttgccctctgctcccctcttctgtcctggcaatgccagcaacctatcctcagatgccatccaggactagggcagcaggaagtaattctccccaccccagactcctgctccctggacaaagaggaacctccctactggcccactgataccttcaccactaatgcacagaaccctggctgttcctgtcagtagacaggccaagcgagagatggtctcagggcagggcacctgtggaaagatgccaccaggtatttgcttctgaaaagggacctgattgcttttcccaggctgctctgggttgaacttcagtcagcccagtgcaatgtggcaagtcttgacagctgaggaaatcagagcctgtggcattcagcctccatggtcaaaagttctcttcgaatcttgcctgcatgataaatgagatcagaaataaaaaaggtgatcatttattgaaactgatgccctcaagtggcagtgtcacaatgatttcaggcccagctttttctcactttcaaagtcattcatagagtcagcttctctcttttcccccatggtctgaataacacactaataaatatacaataaggcctttaatgtctaggtgatttacactaaaaagagagagccattcaaaggctctaaaggtaatttttaaaagccttaaaactcacacccaggcttgtcagggggatatttctcagacaccttgttacaggagcaatcacgtagctcgaagttctctgagcacacagtgggcaggagacttgagctctaagtattcttggaggaaattcttcacacacaatatgagcttggacaagtctcagaatctctacaagcctcatctttgtcaaatggtagtaattgtgccactcacggggttgtcgtgggtttaaattagatcaacaagcagagcaggtgctgatagtgcctaaccccctgcctcccaggctgtctgtctaagggacactctcctctcaggctgctcagggtcatgggagagtgggcaggaagagagccagggttacagatttcacttaaacccctccttctcagagtaaccacttgtgttctccaagatagatcccaaagtaccagtcccattgagtatacctggatttaccatattcctccccactttaagtagtaatattgaagcaactactaaaatgctagtcctcttaagaggaactggaccttcagcgattaacatagtaggtctcaagctttagtaatacaagtgagaactacacattttacaaacttcatacaattgagtctcatcttttttttttttttttttttttttgagatggagtcttgctcttgtcacccaggctggagtgtagtggcgtgatctcagctcactgccagcctccgtctcctgggttcaagtgattttcctgcctcagcctcctgagtagctgggattacaggcccccaccaccacacctggctaatttttgtatttttagtagagacagggttttaccatcttggccaggctggtctcaaactcctgaccttgtgatccacccacctcagcctcccaaagtgctgggattacaggcatgagccaccgcacccggcccgagtctcatcttgagctattctgattttactcgtcttggagtgggccatgagcatatgtatgtttagaaagctctgcagggattctgggtgtgcaccaaaagttaagaatcatggctctaacatctcagcttgaattggttgatcacataagcgggtagctttatataaccatttactaagcactaggaagaaaagtaaaaaagaaagcttaaagacttgggagggacttgtgtttaaggtggagagccatttttctcccacttatgggtggacaggctagtgacaaggtttccaaccctggcctaatcctgcctacatagtccctgagctgaggtagctggagggtatccaaggtcatgaatgtcactggtctccacaggtggatatactcctgacacatctgttattctgtctctagaaggactatggcttccaaagccacaggggaatgagaagaatacagatggactagagaagccaaacctcttaaagccagaaggaagctccatcccattcttccatttaactaaccatccatccatccattcatccaccaaccatctatccattatccatccatacatcccatctacccacctatccatccatccatctacccatccatccatccgttcatccatccatccatccatccactcatccatctaccatccatccattcatccatccatccatccatccatcaatccattcatccattaatccatctatcatccattgatccatccatccacccatccatccattctctttgtacttcacatattgactctcatctaggtcccaggttaacaacagagccacagccctcctttttgttctcatgaaacagatactatgttgttaatattcatggtaaatatctgtacagtgcatgttcagtttgccaagtgagtcaacctctatcaactcatttcacctttactatgatctgtaccattcatattattcacctcctttatagaagagtaaaccgaatctcagagagcttccataatttgcttatagtcatgggtaacacagggaaacagatcttctgggtccatttcttttcttgtgttgttttcccaagaaagccttgcagttgaaccttggcgtcacgcctggctccgaggaaactaagagctgttcttatccagtcaggaaaagctcttctcaggaggactcctctgaaatttggtcatctaattctggcccacaagtcttgaagatggagactttgggttgcacacctttttatgctagcaatgtctggcacactgcctagcacatagtaggggttctatattaggtggatggataacatatcaattgaagctagttctaggatgcacctcttctaaagcctaagctctgggtctaaaaattaaagccccgttcaagatcacagaagagtctccaatcgatgaaaagatgaaaagtattttctccctgccctccacccacacccaggaataaatgtgcaaccctccctggggctcaggaagcagctgtcaaaatgcacctcaactgtgaaggttgtcatgaagtacaaaggacaattcctttcctggcaggtacaacttttactcacgattgctttcattgatgggcataaaaaaaaaaaaaaaaaaaaaaaaaaaaaaaaaccttcagcttctgccagttctgaccttcgagatttgacagctgaaggcttgtagtgaggctcttttgagctgctgcttttgctttctcactctgccctggatgtttgatggattgaacaccaggacgatgagagaactgtgaatacctgtaaccccgtgcttgtcagaatggcatcttggccaatcccataatgataaatatatattgtatacaaagagaagtcaaaatgcatagaaacagacacttctcatctcagaagtgtttactgagcctcactgtttcccagtggggagggagatggtaaaaataggtgcaagaattttagtgatagaacactggtgtcaagaaattcactcatagttcatgtatgcattctgtcaacaaatgtctatgagtcatgctcagtcccaggcactggttggactctggaagctcattcagccttccaggggctcagaacaaggtttggagttggacgacagacacagttatgaggccataaggaaaggggtgtaatgggtgctgtgcattgggtgctatgggaatgcttgtggctgtcaggcaagctagccctgagaaggacacttgagctggctctgcaggggcaaggggtgtcaggtggatgatgagaggaagacattccacacagagagtgcacgtgtgcaaaggaccgcctgaggacacagatgatgagctgtggccacgtgattctcttggtttcttcctccccctcctgcccggggttccttatcctggctctctgagtgctcactttcatgtgtttgtggccactggcttatgtagcaagaaagcccatccctctccacaaaagcagtcctcagacagcaaagcctcatccctaagccccacaatcaccactacctcttcttgtagcaaatgtcctgctgcaaatgcccagaagacctccctctgagtgcaggctctcccctcgctttcactttctctctggtagtatcttcttccctaacgaaaactccaagtacctatatggacaatctgtgcatacaactattttttacaccagcacaagtgggtttcagtggatgagccaggactccaggaatggcctgttgtcccttcagtccccactttgcaagaagagtagccatggagatggggtgggggttctttgtggactgcccttaaccccttttccactacaaaaacccctacacatgcaatgtcccctcctctgagaagcccttttagggtttctcaaatagcattgaccatgtagccttgtgaccattcagttaccagcttgtctctccctacagtcaacagggacccagggtcctctccctgttgactcataagtgccaacacatgaaagacagggagagaatgaggctgctggctggggacgggacaggacctggcatcccagataggaattcacgtcccttccttcattccccgtaatttgtatgataatgaggaagagaaagaggaagaatcacttgatgcttactctctggtctcagcattgttctaagtgctttgcatgtgtcagctcatctaatattatgtgtaccaccacttggtgagggaggccctagcactactacttttacagtggggaagctgaggctcagtgaggttaagtaacctgcctagagttgcacagcttgtaaggagtagactggatctgagcccagctaatccagctccactgtccctgctcccaatcaccactctatggatggtaactaccctattgccagctgataattaaggatgcagtcttatttatttatcattattaaccattatttattgtttataaatcccagctgcatttttctatggtgtgcatacagtccttcctgtccgcaataaatggcaaagttataaggctttgatgcacagaagaggcctgttttagagagcaggcagtcctgagacttatgtctggcactgccgaaggtcatagagagcctatccagaaaggctggcctccgctctcctgtcttctgaagctccattccaacccagttgccttcaccttcaaaaaccaagtctgcattgaggagatggaatcgggtgatggaattgccagctctttgagccataaggaaactgtccaggcaactggagctgatggcccaagagtgaggaaacaccatgacccacttagtagcccagttcccctctgcattcatgcccagcctcaaagcaaacctccttctttctcattacttggcctgtttctaagtttgccttttcctctttgttttatttagggaacgacacacatatgcctggctaaactccttgcttttacagaaatgcattctcttatggttcagagccttagtgaagagccatagcagccttgggattttgaatttaaagggcttcacaaagtctacacaaagatttggtgcaatgtctattcctgggagaatcttacatcagtaagctcagtgaatgagtgttcccactcctttccaatgactgattgtgttccccctgccagtggggaagtcttgtggtggtgagaaaagggagggtccctaggggaggccactgagagcaggctgagcccagggcatgagacctaccattgccagaagctgaagatgtttcttcagatcactcacctgagggcaccaggttacctgaggatccaggaccttgctccaccctatagggcaacttagctcaaatgatgcacacataatgggagtctaaggaaagacctgtgggccatgctgcttttttcttagccccactgtgtgatccaggctttcaattcaccaaaaggagtgtgaaggagaacccacagtcaaattggtattttgcattgtgctgttcattctgtgggacgttccttgcagtcctagaatgatcatctcagtgacttctcctggccatcaggaagccccatgttggaataaatgaagacccggatgagagaactgacaagtgaatatcacgggctgttaatcttcagcctcaaatcctttaggggatccctgtgaaacccaggatcaagtctgagctgtttattagtatggcactcaaagccactgatcaagcctcacccctcctgagcctggctcaccccatttctctggacccatgattcgtttgtatcaaactacccacagttgcccccaagtgaagcaagccagttcaagccattttgccttccctcaccttcccgaccatcaagaacaataggtcttctcctccaagaaggaatctcttagctccttttccacaaagcctttcttgagaccccagaccttctgtgagcagagctgattgcaccaccatttgctgcctgttccacatctctatgagtgttctcacagccctgggccacatttgttctttcacatgtcttcctcaccaaccaggtaccccaagaatagggatgggcattatttatcactgtatctgcaatgcctagcacagtacttgtctcacagtcaataaatgcttatgaaatgaacaaattcccaaattaattggaccagaaactctttgaaaacttgcgacatggttttaagaatgcatctataatgctcttgaccaaaattccatctctgttcttcataacgactcacttccttctactcaacctccaatcgaaggactgtcttcagcctgggttatctccatttgtggccttaaccatcctacactgccgagcaaatgctggcctatgttagtcttggaaatgaggtggttcccatgcttggtgattgccctgtccgtgtgtgccttttagttcctctaatttcctgagctatttcctgcatatttcctgttcttccagtcaggacttctacttagtaattttcccccaattcctccttctccttagtttactagtctttacatcaccacttaaccacactgacttctgttgagtgttttatcttttcagataatctaagatgaattccaattacattctgtccaactgtttcctaaatattccctccatgattttgtttctctgtcttaggactaaaatttctctgtgactgcatgaaattctaatcggcagtctgctggatgttcacctgcaggcctcagagtgatttccctatctggagtcttccagcctttctcgcagtggcctggtcacctgccctgggagcttcctagtgaccattggctcatcctctcagtagatccagatgacttccatttctaaaaagcctcacttgtctatcaactttcttgtttaacctctgccaccttgtctaacttacggacagtctccagggttccaggaggtggtggcagcaggtacattgtgtgtgggatgtgagccagaaaatgtggttgttggcaaagccagaaatcagatggaaataaaaactcctgtatttcatcatatacccaaggtccttagttcttggccttcacccatgactgcctctccaatttcacaatcctacatgactgtttgtgggttaaaggcataatctagctagcagaacttgaaaaatatttcaatcatggaatcatgaaccagaaatgaaccttaaaagtaattgaattcaaattctttatcccctaccccaaaacaatgcaagaggctcttccaaagcccatctggctttgacttgcctgactccagcagtagaatgctcaccaccttgcaaaacagatcaccccattgtacagcagctttagctcccaggtagaacttgctgatatccccttggctttgtaactttggaaaggtaatgactgtctctaaaaagttattcaatatctccaaacctcttgtgttttatacacaaaatggcaatagtaatacctgcttaccttgtaggctctttgtgaaaataatgcttttaacaacgatagccaatgtgtatagagtatttaccatgttcttaatacaaagacatatgatttcatttaatactacagtttccctatgaagtagtactatgataatgcatacaaagcacctagaatcatatcagcacccaacacatgatagttccttctcctatttcaccatgatctggttgatcctctatttgtcctctagagtcatacagaggaagcttactttctcctaacaaggcagtctgtcttccctttgaggatagtttttatatctcttcttcacttgttttcccaggctaagtgattttagtctcttctacagcatagttgccacagccatattgttcagagggattcttaccagcaaaggggtcaggggacttgttcttcagtgatctggaacctccacccgctgatgtggcttaagcctggctcaccctttcgctagctttattctgcgtttgaaccccagccacctaaagttgacaccgttaggaaccatgaaagctgctgtagcatttcactaaaaccatttcttagactatttgattcttttttctgaatggagaatcctcaagtttttcttgcaggcaaagaaggcctttcttgtttgctattgacattcccaaaaatgtctgattcggaaagaaattcaattctggccccagctttcacatcatcttgctttgtttgtcatccctgtagcctgccagctttgcccctttgttcccctaattgccagagacatttttatactgagtaaattgcatcaggcccactgcaaaatgaatcaatttgggaagagtatgagctgcactgttgtcttaagtgtgcattaacatttagatgcgttatttaaaatgggcctggagttcatgccagagagactgcctcatgcctattctgactcattctctgctattggactgcacagaagggaactggggagccctacagcccaccaccaaccctgttttattctccatatctccagggagggcttgaactaggtgagaacttctaagagctcagatttgggaagtaaatttacaaacggagtttgacttggtggtctcagagtgaagtaaagacaggtgaaggaggagatgaaggggaggcgaggttctccttctctgtctgtcacacaccatgcacacacttgacatctagctttaaatacaaatcatacggccagaagtctttggaggtaaaacaaagcatacacaaaaacacaaaggacaccagccaacgctgtagtttaaaaattaagtgatgttctggaactggtgaaaaagcaaggctgcaatcctgataatcatgtggtgatttgatgagataattcttttatcatcaggagagtcagataatatctccattagtagcaggaggtttaaaaattggagagagtggcaacaccaggacaatagcctgattaatgctttttcaatcacctgggctcatggcctaaactggtaatggactccatccatcaaaaaattattctatctggcatcctggtttctgaagaaatctggacgtcctcatagaggattggttaaatgatttaatgtggatgaaagctcttagcacagtgccccagtaaaagctgcttgaatctattccgtctattttaatatatgttcagagatataatgacccactagatacacaagagaaataaaatgacagttgtataatgaagatcttgaagctctgagatgtatgattatcagcaacgtaaggatggcaccttctgggggagattaacctggactccccgttcctgagggtcacttctctctgtgctgcccctaaacctctctgtatgtgacagccccagtcccatggaaattcactggctgtgtgtgtttctatccattttttccactacagcctcaacttcatcaaaacatacactgaactttcattgtggggtccccaaagtccaaaagagtgcctgacacagaagaagtattcaataaatttttgttgactgggcagtatttccaaattaaaactcaaaattagtgtcatgcgaatgtgtgagtgaaagtagatgatgataaggatatctgatgtattttgtgccaggcaggcctgaaacagtagcatccctgaccagagatagaaaacaagacatactcactgctaacatactcactgctaacccagctcattgctgtcaaataacaacagctaccacgtttatagcacttactatatgctggacattgttctaaatgcctttacctatctttacccatttaattttcacaatgggcctgtgaggtaacatattattatccccatttcacaaatgaagagactgaacttgttcagtcacacagctagtaatgaacagagttgggatttgatcccacagacaccactgcactatatgatgtgacccctccagaagagatgtagagaggtggctccccactattcctcccccttagcaggggacttcacagtggccctggcaggtgacatgccagatgcacagggaaaagtacccgtgagaagagaccatctccccgacatgtaccagatggaacagcatctccaccacctacccagtggacccccttcgttcagctaccactaggacctgggaggcaggatcctaggcaaagcctcaccacatatggtatctgtatgggaaaactgagagcagaaccattgcaagctggagagatgtttcatgctgtgccctgtttcaggacaggtgtgggggactaaaggcagtgtctgatctatactcccaccaaaccccaacagtgcacttagcagaggagttgtttcattctattcataggtaaaattgggtaatgaaccactaagaggagagacatgtacataatgtattcttaggtaaactgaggcaagatgagggtgactgagtctgcatgcattctgctgccctgcaggagctcactctgaacacagacccgactccagcactgtcactgtcagagccctcacccaggtcactggacccagaactcaccttagcccactcggccaagcttgagctggcctttcacagctgtgtaaataggatttccaaaatctccagaggaagggtgaaaatatctccctgttttctaattggcttatgaaaacatcttcctctaattgaactttcccctcttgcctgtgccttttgatgcctatacttaattgtttctaaacaggaagctagtgtgataagaatttagttacatctgcatcttccgtgctgaaactattttaccgtatgcttctaaagttggttacaggttgattttgatgagagtaatgttaagtcccaccagttttgctataattgatagtctgctacatgattggggaaagaaaattgtttattgatttccaattcaaaaaggacatctacaaaagtgtttcccacaaccacatgatcccattatgcctccccctatccccacccctaccatcttggtgaggtcttaccccatggatcacccctacccttcatcctatccaggattacccatctctttgccttcattcactcattcatccattcagtcattaaatacttatttcaatacgaattcctctattatgtgcagggaaattagctagatggtgaaaatagaacaggggacaagcagaaacagtcactatcctcaggaagctcacatgctagagagtgaaatatatactacattacaattatatgtataattatgtcattgccacagtgatacatgacagaggggtacaggcttgcaggagctcttgcaagtagggacctgagctaggccaggggctcaggggagccttcccccaggaggtggcatttgaactcaagtgtgaaagatgagtagaagtgacaagtagcaagaccctttctgggagtgggaacagcatatgaaggacctgaagggaaagaggtaggatattttttaggaaatcagggaaaacatgcatctgagtctgaaagaaaagaggagactggctggagagaaggccaggggaaaggacaggcagaggactgatcaggaatatttaggatcataatccttatcttcaaagccaaggaaagctgatgtagagtttaaggatggaactgcaagtcagttggaggtagggtagggatgggtatgggaaccccagacctttgcagcaccacaaggaaagggagggtagtcctgaatacagagtgaggcatagagaaaagtgaatgacttgcagatatgtacaagagacaatgggcaggattagtgatgggttggatacaggtgggaaagaggagaagatatttttagcttgaccaactgggtagacagagccattcaccaaaacaggcaaaaatgacggaggcacatgtgtggagagaaaagtacaaacttcagttttgagatgttgagttttttgaaacttataaacatccaagaggaaacgcatgtggacacaagggtctggagtttggaggaaagatgtggaccatctttccaaactccaaaaaccaggagttgttggcatgcaggagtagtcttcaagccctgggagtgtattaaaaggtctaggaaattctcattgttcaattcccacctatgagtgagaatatgcggtgtttggttttttgttcttgcgatagtttactgagaatgatgatttccaatttcatccatgtccctacaaaggacatgaactcatcattttttatggctgcatagtattccatggtgtatatgtgccacattttcttaatccagtctatcattgttggacatttgggttggttccaagtctttgctattgtgaatagtgccacaataaacatacgtgtgcatgtgtctttatagcagcatgatttatagtcctttggatatatacccagtaatgggatggctgggtcaaatggtatttctagttctagatccctgaggaatcgccacactgacttccacaatggttgaactagtttacagtctcaccaacagtgtaaaagtgttcctgtttctccacatcctctccagcacctgttgtttcctaactttttaatgattgccattctaactggtgtgagatggtatctcattgtggttttgatttgcatttctctgatggccagtgatggtgagcattttttcatgtgttttttggctgcataaatgtcttcttttgagaagtgtctgttcatttcctttgcccactttttgatggggttgtttgtttttttcttgtaaatttgtttgagttcattgtagattctggatattagccctttgtcagatgagtaggttgtgaaaattttctcccattttgtgggttgcctgttcactctgatggtagtttcttttgctgtgcagaagctgtttagtttaattagatcccatttgtcaattttgtcttttgttgccattgcttttggtgttttagacatgaagtccttgcccgtgcctaagtcctgaatggtaatgcctaggttttcttctagggtttttatggttttaggtctaacgtttaagtctttaatccatcttgaattgatttttgtataaggtgtaaggaagggatccagtttcagctttctacatatggctagccagttttcccagcaccatttattaaatagggaatcctttccccattgcttgtttttctcaggtttgtcaaagatcagatagttgtagatatgcggcattatttctgagggctctgttctgttccattgatctatatctctgttttggtaccagtaccatgctgttttggttactgtagccttgtagtatagttgaagtcaggtagtgtgatgcctccaactttgttcttttggcttaggattgacttggcgatgtgggctcttttttggttccgtatgaactttaaagtagttttttccaattatgtgaagaaagtcattggtagcttgatggggacggcattgaatctataaattaccttgggcagtatggccattttcacgatattgattcttcctacccatgagcatggaatgttcttccatttgtttgcatcctcttttatttcattgagcagtggtttgtagttctccttgaagaggtccttcacgtcccttgtaaggtggattcctaggtatttttattctctttgaagcaattgtgaatgggagttcactcatgatttggctctctgtttgtctgttgttggtgtgtaagaatgcttgtgatttttgtacattgattttgtatcctgagactttgctgaagttgcttatcagcttaaggagattttgggctgagacagtggggttttctagatatacaatcatgtcgtctgcaaacagggacaatttgacttcctcttttcctaattgaataccctttatttccttcacctgcctaattgccctggccagaacttccaacactatgttgaataggagtggtgagagagggcatccctgtcttgtgccagttttcaaagggaatgcttccagtttttgcccattcagtatgatattggctgtgggtttgtcatagatagctcttattattttgagatacgtcccatcaattcctaatttattgagagtttttagcatgaagtcttgttgaattttgtcaaaggccttttctgcatctattgagataatcatgtggtttttgtctttggctctgtttatatgctggattacatttattgatttgcgtatattgaaccagccttgcatcccagggatgaagcccacttgatcatggtggataagctttttgatgtgctgctggattcggtttgccagtattttattgaggatttttgcatcaatgttcatcaaggatattggtctagacctaaacaaaatctaaagctattataacatttctggaataaaacataagagaaaattattgcagacttgggtaagaaaaaacttttttagatagcatacaaaaagcataaactataaaacaaaatattgatcaataggaatttatcaaaatttaaaacttttaaatattcaaaagattccatttgaaaaatcaaaatacaagccacagtgtgggagaaaatattagctatacttacatctgaaaagaacttgtacccacccaattaagtgggcaaaatattttaatagacgttacactaaagaagatatacaaatggccatgaaacatatgaaaagatgctcaacatcgctagtcattagtaaaattacaatagctaaaattagaaagactaaccataccaagtgttgttaaggatataaaggaactagaactttcatatactactggtgagaatacaacatggtataatcactttggaaaaacaattggaacatttctttaaaaactagacatatgcctaccatacaacccagccattctactccctgtctggacatttactcaagaggatgaaaacgtatgtccccacaaaactttatgcattaaaattaagagcagcattattcacagtagtttaaaactgcacccaaatgtgtatcaacaggtgaatagataaagaaattgtggtttatctatactatggaacactatccaacaataaaaataaataaaatactgatatatatgataacatggatgaatctcaaaattattatgctaagagaaagaagccaggcacaaagaccacatagtttgtgcttccatttatatgtaattccagaaaatgcaaactaatctactaatctctaatgacagagagcaaggcagtggttccccaggaagcagggcaggattgactgcaaagggacaagataactttttggaaggtagagagagggttggagatgatggaaatgttctatatttggaatgtagttgtggtttctcagtgtaacaactattaaaactcatcaacctgtacactttaaatggataccatttattgcacataagttttgcctcaataaagctgacattttgtaaaaatacctagaaaaaagaggtgagagtaaaattagtgaaaaggagatgaggaagtgatacatgtatgtacagacaagtgcattgagtgtaagggtgaagggctagtgagagagatggtggcagagcagagaggcaaaggatcagagcccacttatttagccttacctacccttcagtctgccttgcacagtgcagacacagctagagaacatgagtggtattcctgggcctctgattcacgaatcaccttcctcatgaagacttctcagaaaacatcagcccactctgttctcttcctctctcaactctgtaaaactgtctagaccacaaaataaaactccagtgtcccacctgatcaggtaatacctggaagttgttcaaccatactctgtttcctcagtctataaacatccaatactctctttgtttgcaaattgttttgtataggtgtttctggtttccccaaagagactgttgtttcactattagttattgatttctttttgctgcaaacatattataattattgtacacaataaatacttatagcagcctatgaagtaaatactattaatttccatttacagcaaataaaactaaggctcaaggaaattaagcaacttcccaaaaaagatgaactgagcctattcataatcattgtagaaacaagcttcttctattttggggccatgttttatgctttgttggcccaccattgcaagatgctaaacaaatattggtttattcattgattaattccttcaactattatttttatgatttaaaatagcaaacacctgccatcagggactcttaaggggacttaagaatgccaattgctagggacatttcatacttgccagaccagatgaaggaattaaaggagccacaggttttgtgtcactgcctgggtgggatgaaagaaatggagtcagcttcctcctctctgcttacccagcagcctttttacttcttctaggatttcttctccttccctgtgagagaagccacaagaatgtcagggactgtggccacctccactggccaccttggcccaaacccagtgtcaagcttcctttacacccatgatcccataggcaatcctggactagagagtggtaactaaagccactgggtggtcattcttcttcttacaaagtgccaagtcccaaacctgaaccacaaacagatcacaattgctaaacctaaaaactacctttcgattgccttgtaaataaagccccctctctagctctctttctctttttaaatgcttctccccaaccctacctttattctttctggttctccagtgtccccaaagtctgcactataattgcatatctaaaaggttattttagttgttgtaaaaggcattccattagaaataaattggaataaaagaagagagacatgttaagaaatatagattccaactatgtgtctttgatttttgcataacttagggtgagtcatggttctttgatgaagcagttggcagaggaggtaaggattcattcatgaataaaagtataaaagttcctaggattcatgaggactcagagagagatagttgcctggaaggtagaaaggctcttttcttccagatttcagacttaatattcactgaaaagcatgagagaaggagggactgaaagggattgtacaagcaagtacagaaagctttcgctgatctaatttactcttaaaacagccttctccatggttgaaggaacccctgttctccttaagcctttctatctcagctacatttttgaaaaataagcttcttttaatctatcaggggaaaccagggatgtgttgaggatgcttctgtgagagatgaagccgaaatcaataatgctgaaaaaggtcaaagctagaattgttatttaaatgttgagtgtccccaaatttactacaagttgcttataaacatttacaaaattgactctcttttccctctagaagtttccatgacagaaaagcctccacacatgaccatgggcacctggtcttctcatagcagggcttatgtatcactgttcccctccgtccacagatgggcatacctgcacacgctactcacatccatttctttttccctttctattaaaataaaaatacacactgaattagaatcaccaagaaaggagcctgggcatctttttaataatgcacaccttgatgatctccatgactgggcacgcttgggagacgctgaattagatggcttaagcagaacttctcagcatttgttgtgcctgtgaatcacctggggatctagtaaaatgcatgttctgattcaataggtcagggatgggctggaagtctggatttctttttttttttttttttttttttttgagttgcagatatgggatttttttgggttttttttttattatactctaagttttagggtacatgtgcacaacatgcaggttagttacgtatgtatacatgtgccatgttggtgtgctgcacccattaactcatcatttaacattaggtatatctcctaatgctatcccttcccgctccccacaccccatgacaggcaccagtgtgtgatgttccccttctggtgtccatgtgttctcattgttcaattcccacctatgagtgagaacacgcggtgtttggttttttgtccctgcgatagtttgctgagaatgatggtttccagcttcatccatgtccctacaaaggacatgaactcatcattttttatggctgcatagtattccatggtgtatatgtgccacattttctgcatttctaacaagctgacgcctatactgctctgaacagaccactttcagtagcaggagtcagaaaggaaatgcgttgggtgtccacatgcagatgttaactgaagctagaggccagaacagtttcagagggtccacgtgtactttctgcttgccttgaacatcagatcagtgacggtggaaaagcctctcaagaaagccagccagaccctgtagggtggcagtttctcagtgcactccccaagttctagatcagaccctcagtttggtggggccaaacatgctcaggactcaggctaaccacactcacgcaagacatgtaagtcatgaataggattttgaaatgtccaataaaacatacagtgattggtgtgaattcactccttgaccaatcagtgcattctctgactgccggcagagccacgctgggggccaagataactgattatgatcagtaggtggtttggtgaacaggccttcagatacatcaactcattgacatcatggcccctctctgtaccatgagggccatcttaagtcaggactcagtcagcttgtcctgcctttcctgctcctattctaggaagttcttgcttctctagatttgtttgtgttcaactcattattgcatcctaatccctcctaaaccccaggtgctatcctgagcacagaggccatagaaatgttaattttagtcaaaccctgctcctcctgatttgggcctggcctggaagtcatttctgcctcttagttttttccatttttaattatttaacagtggtaaaatgcacataaaatttaccatcttaatcatctttaaatgtacagttcaatagtgttaaagtacattcacattgctttgcaactatcaccaccatctatctctagaaccttttcatcatcccaaactgaaactgtgtacccaataaacaatagttccccacttccccctacctccaaccccaggcaaccaccactatactttctgtctatatgaatttgactactctaggtacctcaaaaatgtagaattcgatggtatttgtcgttttgtgattgacatttcacttagcataatgtgctcaaggttcattcatattgtaacgtgtgtcagagttttcttccttttttaatgctgaataatattccattgtatgtatataccacatttggtttattcattcatctgtcaatggagacttgagttgctttcaacatttgactattgtgaataatgctgctataatcatggttgtgcaaatacctcttcaagaccctgctttcccttttcttggatatatacctagaagtggaattgctggatcctacggtaatttggcttttaattttctaaggagttaccatgatgtttccatagtggctgcatcattttacattcctaccagcagtgcacaaggattccaatgtctctacatcctcactgatattttcacctcttcctttaagtgtctttgtcagttacaagctgggtcattccccagtgtcccacccaaaacactgtttcggtcttctttaccccatccaaatcctgcttaactttttttttttgttttgtttttgagacggagtcttgctccgtcacccaggctggagggcagtggcacaatctcggctcaccgcaagctctgcctcctgggttcacaccattctcctgcctcagcctcctgaggagctgggactacaggcacccaccaccaggcctggctaattttttgtatttttagtaaagatggggtttcaccgtgttggccaggatggtctcaatctcccgacctcatgatccacccgcctcggcctcccaaagtgctgggattacagacatgagccaatcctgctcaacttctaaagctaagtctcatattttctaaaaagtgcaaagcattatcccctgatgagctcaccctgtttatacctgatcatgagtgtctcattctctaatcgccttctattaccccactagagatcatattctatgctccttggcttgatctagcagtaaaaagcaattggtatttgttgtagcttgtttgatagaataatataaagaaaagcaagaaccatgcagaattggaaaaagggattaaatgcccaaagtttgatccctgatctgagaactctgtacaagggcaaaggaaatcaagtcctcttgccaccagaaaactatctctcgcagagacttacgtagagcctctgtacccacctagtcagccgttccttcctggccacagttacctaggggatcactggccctaaagatcatcgggtgaggtgagatgcctctcagaaaaaaactggctctggaagagctagccgcaaatctgtagcaaacctgaactcattatttcgggggattgctgcacgagtccatgtgggttttattacaatatatgcagccacttacattatgtcaggcctgagttttcttctatattcattcaccccatgaatggatgttgctgactgctgaaccaaaccaaactgactttttttttttttttcaattagtgtagctgccttagattatggaaagagctgaatggtgctggtgttggccttttagaatggtgatttctctgccattccatgaattatctgatgtggctgccctgggctgccctgcacccatttattggtatgaagcaagtgcctgaagcctacagccactgtaaacagggcctgggacaaccaggagcccagtttcagggtcctttcaacctcttccacccacaacaaggtttcagtcatctcaggagtgcctggcctaacgtagaactccccctaagctccccagaacctgatggaaccaggagtgctggcagaaggagatattcaggacatctagtacgacttccacctggcatttgaagcccctgccaagtacttatcagtccacttgaacttctcttgtaacaggaagctcaccgcccccaaagatagttcaatcatcttgagatagcacattcactcaggcaccattgatgacccaacagtctacacagcagcaggtccctggacccccttcccctcccccagaggcatgctgggggctgtgtggctcccaggcaacccatcagggtgtcccacccagtagagaattcacagccttctcacctgagaacccagagcaggctggctgctccactgagagcccaaaggctatcaatttactctcagcccatcttgcctccctcaccctggtccaattactaatgcctcccagataataactgcattttccttcacaatcctaaccacactggaccttggagtgaccacaggccacaagtagtctggggtctctgccccacctccagccctcatccttgcttgctcactgtcacagtcaccctggactcaccccatgcctccaggctccttgcctccccctctctacccagccgtcaaagtggccttctattaggatggtgcaaaggtaattgtggtttttcccgttggaagtaatggcaaaaaccgcaataacatttggaccaacctaataaaatgccagcttgactgtgttattcttctgcttagcatcagtcactggctccctatctgctatgggatcaagtccagccttgctgatgagcctcgaggtctctctcatttctccattttactccacccttcactgcctctctccttgttcaagcattacccaaggctgcgattcttcctcatctcctcttcactcttcaccccatatcccccatgagagcaaaccctgtcaattccatctccaaaatatacacttacccacttgcccctccctcctaccatcctagcccaagccaccataatctctcacctggtcaactgatacagcagtacctcctgactggcctttctagctccacttttgctcccttctttctctgcacagcagccagcataataaacatcaaaaatgtagatcaagttatgccagcaggccacctcactataaaacctttgcatggcttcccattggtctcagaaaaaaatctcagcctaaagccctgtgtgacctggctctgcccacctctctgaccttctctcacacagcgtccccacactggctgcccatctgtttctcctggccactggccctttgtactcactgctccctagcatgcaacaccttcccttggctctatactgtcacctcccactcatcctttggagctcagctggaaaaccaccacctcaggaattcccactgtgatctgtgttttcctctgtctcagtgttgtgtttagctccttttagcaccaccaacaactggtaattaattaatatatttggttccttgtttattgtccaaatcacctcactattaggttggtgcaaaagtaattgcagtttttgccactgaaagtaatggtaaaaaccacaattacttttgcaccaacctatagaaagaaagctccatgagggcaagaactttatggatctcattatatccacagtaacacagcactaaacaccattcatagcacttagtagaagctcgataaattttgttaatttaatgccaaataaatccagcccctgctgcttctccagtgttccttctgccacgcctcaccccatgcccacatcccagccatgttgcctgggattcctgaagatgcagctgttttaggtctctgccttcactcatgcccctgggctgggattcttaagccagaaaactccactgatggaaatgttacctcctctctaaagcatttccaggttccccaagcaaagtcatttgcccagatctctatgtgccatggtacggtgcccatgcattgttctttctcttggaaacttggttgtaatgatgctttttcatatctgtatcctctgtgagatctaatttccctgatgaaagatatcacggcttttccatctccaccaaccttcactcataatcaaatacagaacctggagcatattagttgttcaacaaacatttgttgaaatgatgaatgaattaagtggaagagcagtccctggatataaatccaatagaccagatccctaatcccagctccctggtaacctgagtgacccgtaataccacttgtgtctcagtttcttcaactgtaaaatgggaatcataatttgttacctatctatctcataagtcagtttaagatgaaaataaaatagtaaataccaaaatagtttgaaaactataaattcattcatttaaacaatatctattaagtccttactcagtgctgaggcacttgagttacaactgcgaagacatcatcccttgaagagttccacgtcttcatactggcatatgattactagttagttgcccaccctgcataaagacaatctaccctgaactgtcttagttcttggtctgcagcatctttgcattaatcttttgcttttggattcactgcatacctgtttactctagttttactggaggtctctgcatgcattccagctgtaatcacggctgaatgattccctcaccaatcctggttccacttcaagaaaactgtcagcagtacacacagcacccagcccatccatctgtgtaaagagataatgtaattctaagccaatatttaacattgtaggatgaggcataaactcaatatgctttcaggcggagtaaaaaaaaaatatgtgccccatctcattaatcacaataagaatgagggatggggcagatacccaggccggtgctgttcctccaagttaatctgtcttaataccaagcccttgataaaaagaatgcctgagtcattgttctgcttgtttgatggcaatttacattgggggagctcaagatttatgaagtaacaagaacctctgagtaataaaacgttgagtgatccatgctctgtttggaagtcacttctactgcaaacactctctggggatgaaacttcaagagaaggatttcaagagaagttatgcatttacaaaactgatcttttacaagtgcttattgggttcattcattcatccattcattcagcaaatcttaactatgcattaactctgtacaaagctctgttaggggtttggggaccaccaaagaagccagcaatggtctgtaccctcaagggactcgcattagagaagttgtgactcaaattcgttactaagggtgctgcatggactatatgcttcgcaagagcagggatgatgcctgttttattctccagcgtgtacctgtgcctattacaggacctggcaaagaggagctcattaaaaatttgttaaatggtaagtgtccatcaagagataaatggataaacaaaatgtggtacaatggaatattattcaaccttggaaaggaaggaaattctgacacctgctacaatgtgtgtgaaccttgaagacattatgctaaccagacacataaagacaaatactatacaattccactcatgtgaggcaccatatggacagaaagtagaatggtagctacccagggctgggagtaggagggaatggggagtgactgcttaactggtacgaagtttcaattttgcaaaacgagaaatgttctagagatggatggcagtgatcattgcaccacagtgcaaatgaacttcatgccactaaactgtatactttaaatggttgagctggtatattttatgttatggatattttaccacaataaaaaaaaatgttttcaaaagggctagcaagaaatccagagagagcttgaggcaagggatgaaatggagctttccacagagatgaggctattgaggggaacctgtactttcccccggaaggaggaagaagaggacatgaagcagtgctaaggacaccccctgggcatcctccaaagaaaggaggccacgggaagagtggtgagaatttgcaggagcagcaaaccagtaaggacatggaaatgaagcgtcggagagtttcaaggacagttctttcaaggatttcagcagtgtgcaaaggcctttggctttgacaagtaagaggtaacagatgacctctggtagagcatctccagagaattgtcggcatggaagtgaggctcacaggatgaatgccaagtaaatgaggaataagacattgacattcagtagtgaaggaaggggaatgatggtggggacttgaaagaatcagtggagaggacagaaggaagacttagcaagggacagagggactgaagagatgttctagaaggatccagaagggcttggaaggatgagctgggggagttcttctccccatgcatcagaggtcagtataagaagatgagagaagagaggtgtcaggaaaaagcaaggggaagaagagggtatttaagggctcctgggggacagcccagtctcccttctcagcaatgcaggaagcaagaccaagtgctgatagtgggaagacaagaatatgccagaaaggaggtggggagttggggactggggttgtgtcaatgtggtagggagcaaatcagagatgagcaaagcattagatccagctgagaccagagcccctgtgtatgcaaggatcccagaaagcctggagaaatggcagcattgggctcctggtagcctgaaggagaagagcgaagggaagatttaaccagctggggatggatgagacagggtcagcacaggccagaggaacatgcttctctagggtaggcaagaccatggatggcgctgatgtccatgaagttcctggatgacaaggaaagcagggagcagggaggaggtgaagtcagggactagagcacatgatgaggataaagggatggttccagaaaaaaaaagaagaggctagaccaggtagaagaaaaagaataggtggccattgtattagttctgagattaggtaatttataaaggaaagaggtttaattaggtcatggttctgcaggctgcacaggaagtatagtagcttccacttggcttctcaggaggcctgaggaaacttagaatcatggctgaagacagagggggagcaggcatcttacacggtggagcaagagcaagagcggtagcagggacgtgccacacacttttaaacaaccaaactttgtgataactcactcactcactatcacaagaacagtaccgaggggatggtgcgaaacctttcatgaggattccacccccatgatccagttgcctcccaccaggtcccacctccaacactgggtattacaattccacatgagatttgggtgggggacacagatccaaaccatatcagccatcaaggaactctgggatcggaaatcatggccaaggagccactgtggggaaggagccatgttgaggagccgtgttgaggaggagtgggcaccatccaaccttaaggaacagcgagacccaagtgtatgggggtgtcacaatgtccccagtgttggtgactgggtgatgagatggggacaagtgttccatgaataagaaaagcaaccactggggagggaagaacaggggaaggagaggggaaggtatacttggctggcaagggtgacaagagaaagggcctgctgaagctggagtcagatctatggctaggaagacacctggaggcaccgcaagactcaatcagtcaggaagacatgggctggcagcagagggaactccatgcaaggtggttcacggtggtgaaaatgagtccacccggggagaaatgagggttggaagaggagagctggggtttggattttcagcctgagcaataatgatgaacaatctgataaagaggttggctggagggaggcgagagggtctagagagtggaaccagggagatgtgtgggagaaaagtatctgaacttcgagtatttgtaaaactagtcagccctcaacctgaacgtagaagaccctaggagccgggtgcagtggctcatacctgtaatcccaacactttgggaggccaaggcaggtggatcacttgaggccaggggttcaaaaccaacctgaccaaagtgatgaaaccttgtttactaaaaatacaaaaaattaactgggcatggtggtgcacacctgtaattccagctacttgggaggctgaggcaggagaatcacttgaacctgagaggcagaggttacagtgagccgagaccacaccattgaactccagcctgggtaacagcaagaccctgtctcaaaaaaaaaggagaccctggagaaggaccctcaagaaatactcagatgttggattctcaaatgccacaaaaccggggtgaggaacgtatatcttgggaatggagaactcctgccttctaatttgtaggactgccaggcaggccaccacaggtctcattccaactaccaccagccagcttcatgaacttaactaacaagccttttctttttgatggggaggagaagtttactctgagtcttggactccttttctgcaaaatgggagtgtttggagtaggtgatcttctagcttccaaatgctatactcctgtgaatctgcgtccttggctttttcatgccaccgtctctgactgtgctcaattatagtgatgatccaactccacactctcctcactagtgcgatgaatagacactcattaggaaaaagtgaaagcccttggttgaataataatgtcattacatacttatctcaatcagggcggctgtgagcacaaacagcttcttcctgtaaattagaaaaagcccctctgctcttggcagacaaatgagcaaatgagcaaagatgcataagcaaaaggccatggcttggcaagtggagccccgctccattggggcccctctgctcccctcagcagaatgttccagagcaggcccaacctgtacaactgcacccaagaccctgatttcaaccctcaagacaatagacatggcactgatggtggctccattactcccattttacggatgaggtcgacacagagaaagcatcagtaatttcctctatatctcataggccctccacccacataccaagaccctacaggctttagattttgaaaaaaaaaatcacagttcaaaattttattgtttcatttttgcatatttatcatcaataagtgtatttccttgcctaagtagcctgacaaataatgaaggatatctcccaacctcctcccccaaacccagtcactgtgcctccctttcaattttttaggtcatatttgggcattaatcatatcacccacagtcaaaatgccatctcatctggaaggaatagagctgcaatattgggagagcatagaataaatactgagactcataattctttatcatcctctcagctcccatgtgcacttactgaaatgcatttggccaaatgagagtgggggagaggaagaaatgaatcctaatgaagttagtagtaatggcattagaaattgtattttgacttctactattattacttattataagtaatagtattataacaatatcaggagttctcaattagttttgtatcttttggacttaagaaagaaaagaatttaaatttactttttggaccaggagagcaataatcatttcatgactatattcattttcttagcctcatatgaagaaggtgaccagggactagttataacaaatgatcatgccttatttttcaaggcaccctacatgaccgaaacaatatgatttgttgagttcccatgtgagcagaatattgaacctaaaaggaagaaaaagattctgtcttcaagggatttgccctcttgataggaatgcagcgcctggacacacaaaagaattataatgagttttgcagacatttacaaattaccattgagtgctgattagcagcaacagagcatgggtctgtgtggagtttagagaggagaggaggaaagagagtgagctgaggtcagtggggatgtgtgtgctgctgggagccctggtgcactcagtagcaagcaccatgctgacctagaccaaggttctgtttctatttgagcaatgaattgaggctgagcataggccggtggtagggagggagccaggtattgccaaccaagggagtggtacgcagacctggagaacattcacagggctctggtggcagagcctgtgatgaccacaatcatcagatttttttttttcttttttgagatggagtttcactcttgttgcccaggcaggagtgcagtggcactatttcggctcactgcaacctccgtctcccaggttcaagcgattctcctgcctcatcctccctagtagctgagattacaggcgcccaccaccatgcctggataattttcatattttttagtagagacggggtttcaccatgttgactaggctggtctcgaactcctcacctcaggtgataaacccgcctcagccacccaaagtgctgggattacaggcgtgagccaccatgcctggcctcatcaggattttaagatggtgaatctatagtgcccggaatgtgatgatgattgtggtcattgttccaggtgctgtggattcactatcctgaaatccttacaacaacctttttgagcagtgacagcaaatggatatcagccagtatgccagccccatttggttggcaatggttgcttggcacatggtgtaagttgcatccagacttgaggaagggagccatggtggctactggggtcttccatgggcaaagtgtggtggtgtacatggcaaatatttgtcatctctattctaagagatttcccttgattagattatacaacctgaagtaagtgattttcataaacttatatatgattgctttattatgaagctaggagaaggtcatattagaaaaagttatctcttcctcaaggcatttttttttatttattgtaaaattgtcataatatactaagtttaacaaagccagccactctactactatcctctggaaaactgtcattaaaaaacataaagatctatagcagtgatgatgcaaataccttagatgtggcatcctgtgcaggacacagcctgcactgccatatgcagtgaccctgaaccaagtgtgaatctagtttgtctgtattagttccacgagcccacactgcctgatgaaaaagtgagtgagttgtggaggaaaggcagtacatttttataagaccttaacattttgacaaataagcttggatctgatgtaataaacaatgagcaaaaaagctgtttataagcatatgctatcctacattcagatatttatagattgaatagctataatcttttgcattttataaagaacattacagtgtttaaaaatacctcagataagttatttcatttgatccctacatggctatagtctattcctgagcagagaactgacatgggaaaaaggcggccgcaaagggagggggatctcaacataggagttctgtaaaacgttcctcttttagaaaggaaatgtgaggttgtgctcttttcctcaactaggttaggattctcttaactgaaactgaaatgtgcatttcattgtttaatttatcagcatctcaagtagacttgctaaatcatagctccattcattggatgtgccagcataattaattacactgaaacctcctgacagcatcttccagggaccaagaagaaaagacgaaacacaagaaaacagaaaaatctgggtcaatgttctacatattcatgatagtcttagtcagcttgagtcctggctttctctctaattgagtaactttgggtaagtcacttcctgtgtttcctcctctgtcaaaataaggaatagatgatctttatcactcaaggtcccaggaagaaagagatggcacattcaaattggataatttgaggtgagtctaatcagggagattctttacaaaggtgtggggagggtaagaaaaccaccagggctagtaactagcactagtatgccagggctagtaaccatcactagcccagtcctcagtggggaaggcgtgattgctagaatccaaagggagaagagttttgtagagaaggttgtcttgagaggggaagagaccttgactcgggaacataccgtgcagtgccacgggaaaggaactagagaaataaacactccaatgccaccctccacccttgctctgatctactgtggtgttcccattggccaaacacaaccagaagccagagagccagggaggcaggatgcacttcatccccttcagcctcctgcagcacgaagcaggcagggaaggagcagggagcagagctggggtaggcaggagggagctggctcacttcctaagtccaccccggctctgtgaacatacttcatgcacattaaacatcctgttctcttccagatgccaaatgttagatgtcttaggagaattattatttttttgagtagagaacatgctagcatcttgggtgaaagcatcataaagcacagtctgctatcgcaggtgagcgatatctatgttttgaatgaataaatacatgaaacaaacaaaatagtcccttctgaggtctaatagtgaggaactaagagactatgtgcagcatacacatgcatgcacacacacacacacacacacacacacacacacgagtctctaaagagctttgagcttctcacaatagcatggaatttactaggcaggaagtcagtcctgggactccaaccttgaggcaaaacccatcaaggcatccaaagggtcctattgtaatgccacctcaaaggccaggcagacctggaacccaaggattctaggcctgggaatgacttgagggagcagctagcacaactcacccctttatgttccaggctgggttacctcaaactgcagaggggctggacatgcctggcaccgcgcagaaggggcagcacctgtgtggaagccatctacagctgtcactcccccacccaccccttaagactcactgtctctcataggatcatggccctcgtgagtgtgggaaagtttgctgttttaaagatctcagagccccaaactgagtgggccttctaaagaccctcattcaccaagctctctgtagtgttagcatctgcctctcatcccagatttctcccgcagctcctgtttcatttttaaaaattctgctctccctcaccatgaacagagacccagagcagaccagtaccaggtctggaggcctcaaagcttgaagctgttctcttgatactattattatcacaaatcttaatagaaacaaaactgccatttatactgcaccttctgggtgacaggctctgagccaggaaatccaaatacctaatctcatctaagccacccatcacattggtggatctaagccacacatctaagcctcccatcacattggtggattctgcttcttattgcccataggaggacccttagacaggtcctcagacactgagcaacctgcctgagggcccacgacaagttagtggagagccagtatatctttctgcatccaccccactgtgtctcctcctctctgtcagaattagacatggaagggtgaaagagccttctccttcattgtgcttgaggccgtttcatcctgacagtcctggccttgcaaagagggcctcactgggctgcctcaccaaccaagtcctaagggcttcgcatggtacctccagggagcctgttcacctgcttccaaagtgctctctagaagacagaaaggaactaacattgacagagggcacacctatgtgcttgctgcactagacaggcctcatcacttaatcctcccacaacctcgggaagtaggaattattatccccattatacagatgaggaaactgagacctacccaaagagcaaagagtgaagtcagttttgttttgaaagccagtgttcttttcactgcatgccactccctcagagaataaaagagaaaacaggaaggctagacagagcatcctagtcaacctctcagtgatgcagggacctcctagaaacatcctaacaaggactcgttttgttatggaacagacagctcattctgttatgggacatctggagaaaacacgatacgtgactctctgatgtgtacgcctttggccttggctgagttgtggagcagagtttggggatgaggcgaaattaggacctgaaacagcggagtaattaaggcaactggagatgcccagatcacaggaatgagttacccaggtggagccatttgaaaatccaatgggctatagccatccagtcttcatcccagtgttggaaaaaaatgtgagacaggacagggcagaggacagagagacaccaatccacactccttgctattgacgctcaagtaagtgtaaatccacttaatactgttatcaactaatccacatctatcatattactcaaaaggacagcaggagagatttcatcaaaagctgaaatgagatgcatgctctccactgcattccttgacctgccaagtgccaagcctatcagaagagaaaacgagattggtttgtctgcttgattctgagtttacccacagtggcttttcaatgattcctgcattcttttctaaatactcccataccatctggttagaaatctgtttttaaatttgttcaaggatctttgccaatattaccactatgaagttgattttttgaatcaaaacagttacctacgtctaatctgcaactggcatctgcatagctggaaagccatgggttccatccctagcttagacaaacaaacccttgatgttatttacatctgctctcaaaaatcatctttaagaatccttacgaacagcaggaggaagttcctcacccatattcttggcttttttcttatcaggcagaactactggaccaaactgaagtcatcaaacttgggctaaacacctactgaccgtgtgcagaaacagctaggccctggacatatccagcactgaatagggtccagtgtgggacgatatggagtctaccctttaggccctgattccctcttcccactcctaatgactttctctcactctttttaagcaatcctcacccgagccatcaagggccttcatccttgtctctcttcttataaggtcaggcactatattttatttctcagtgcatccccagtggctagctccatgtcttccatggaaaacacactcaaatacacacttgtaacattgatgacaatgttgatgatgggttgcagcaagacacagcctaaagataaatgaatctctgattcagaaagaaaggattatggaaacacattaaatatagtgttgtcaattaatatgattacctattaaagcaggccctacaatactgtaattggtaatggtaaccatggcatattctttgagccagacccaggatgatatttttcatgattagcttttgattaatcctactagatagatatttcatttacagtctatacatttgttcttaaggatttaattgattgtgcaatttataagtattagaattgctgttatgtaaatgaattttcagccatccaattcactttaaggtaattaaattaagtgtggttagttaagaacattagacatctgtgaaaagtgcctgagaaaaatttgttttgcttagaagaagagaaggcctggtatgtttctcttctctcattttgtgcttctctccgagcctgggttctcagcactccctgcccctttagtcactgccttcttgcctctcctgctggcactaactaatttgtcagttaaagaaggacacacgttaagtgaaagtaacaacctgtttcattaacaagctcagctgcttccaagagaaaccagagggactggcgttccttgctgagacactcctctcctcaatttgttgaattgttttccaattttgtcggaataatgttgctcgtgctatgtgtattcaacatcaattttagaatcaaagctccgttgtcaggtctagtagatcagggaactgaacttacccttccctacctgctggatgaataaggagaaaagtctccttttcatacatagttgcatgggatagatggagagtagagacagcatggaattttgaggtacacaggcttgacgttcaattcaattcattcattcatgcaatcaacgcatacttactgagtacatattatgaactcggccctgttctaggcactctgagaggcactaatggatcagccacggaaacctgtctctacaggggctttgagcccacactccatatctgactaaccacatgagacattagacatgtttcttcagttctctgagcctcagtttcctgatccataaaatgggaatattaggagtaaaacttttaaaagaataaaataagataatgtttattaaggacttatagcgtagttcttaatttggggaccatggatcctcagaggaccctggaaagaattgaggggcctatgaacatggatggaaagaatgacatttttattttgattacttctcactgaaatgtagcatttcttccattgtaaatgcaggtaaaaatttactactactatagtaataggagtctgtgtgattttgtcagtaatagaaatcacatgacagctgttgcagacatcttgaaatactactgaagctcatcactacatcaaaattacagatgttattagatctgccatgagatggttatttcatgtgtttataaacaaacacatacattattgcagcataactttttaatgactatatttcagtataactggtttcctttgtagttttacatatttgaaaacattactctggggaatctatgtacttcaccagtctgccaaagaggcccgtggcatccataaaatccaagggcctgatttagatgttgtcgaacacagtggttctcaaagttgagtatgtgttggaatcctctgaggggtctgttaaaaccccctccccacacccaccatcacctcccaagtctctgactctaggctggaacgaggcctaataatttgcatttctaacaagtccccagatgatgctgatgccgctgatctagggaccacactttgagaaccagtggcctaagtatatgacaagtatttaaactcctttttccccaacattgacctggcacgtgaacactttcagattattggaatgctactaaatgatccagaacagcatattaacacaccatctgactctgctagccaggccacgctgagtgttagcccctcctccgcccaaggccaaggtcatatgaccctgctgggctgcttgcggcctcagctcttccctatctctagctccagctctgacttggcacggacaatttcagaagcactgaatattctgggatttagcatcaaggcatactcgctgcctagccagctctaatcctttgtcccttgtccccagggatgatacctagcttctgctttattccatggtacatgaatccctggcccatgccctagttcctataagtcaagagcctgtccccatgttccaggtttggagtcccggccagcatgtggtgcaacaaccatgtttctgatacctaaagattttccaccttcctgcatgtgtgagcattgcctgctattggctttcttgttgacatgcttctttcttttgcagggccactttcccttcataacacctgcataaccaggtgtctagtgccatgtccttcagacaccagatcctaggcctttccagggctcagcacctgagacagctcttcatccctagaataggcttcttcggtccaggctccagggtgtctcatcctggtggagttcactgtaaaacactgcttcatgccttaaataacacatttttcatgctttgctatttggggcagtattgaacatcagattaatataacatctttggagggccaggcacagtggttcatacctgtaatcccaatactttgggaggccaatgtgggagaatcacttgagcccaggagtttgagaccagcctgggcaacattgggagatgctggctctacagaaaaattaaaacttagttgggcaaggtggtgtgcacctgtagtcccagctactcagaagtttgaggtgggcagattgcttgagcccaggaagtcgaggctcactgtgatcacaccactgcactccagcctgggcaacagagcaagactttgtctctaaagtaatggtaataataataatgtaacatcctaggatgagcttatacttgtagtatactgaattcgattaatcatttattgagcatctattaagtactagacatcatgccaagccttagggatagaaagtcaaaaaactaagatacagaccttgttttaagaaatgcataggctaatatgagacgtaaacatataagtaagtaattgagggctcttttcatctcctctgtgtattcatttgcatagttctgctctagttagtcgttcatcactaattctgatttaagtggactatttttagatcctgacaatgatcagtttggggttctcctttggcagaatcttttagttcttttgctttcttttcagagcttgtggccccattccctcccccagtgattactggtgctgagttggctaataaagtgataaaccacttctttgctctacgaaaccaaagtaacaaacttagacaaagacaacagccttcctaggtggaggaagaccgggccgtgataacaagtgtttgactaactctattttctgctaagcctacctggtattcccacttcccatcccctcatctccctttgaacatacaccgtggttatggagttccactgggactgagtaatttgaagttctccccatactaaataagagatgaagatcatgagtacatggtgaagaaaaagaatgctacacatcatttttccattctttgatttttttcaaccaacttcagtgaaatttatgaaatatgaccatgaaagctatctggattcttaccaatattatctggtccaagtcaatcctaccactccaatgccatcagtcatgccagggaaactgcttgacataccctgaactagcgctgttctgctccagtgctgctgtaattaattagacgtttaggagagctggtgagtcaccagtgtttgagtctcagtttgggggttagggaatgaccccaccattctgctgcatacaacagtgtgatgaaacactgcttatgtaataagaagtaagcacctggtggaacatggtgacagattattaagaagtaaatagtaggaacttgtcagttgcctgaaaagcaggctgtgaaactaaaagaatgcaaataatgtaatcattcacataggcatatataaatagcacgtgctttgtccagagaactgttctggggttacctagaactgcatatgagatgaacccagctgctatgaagttaagtcagataaggcagactgaatgtaaagggatgttagtgcttttctgtgtgcacgtgcatatgtgtataactagtataaaagagtccaacagaaaaaaaaaataacaacccaagaaaataaactgagcagagaagcccaaagtaactccaatcacactgggcccctctgtctttgaatttgagctgagctccaggaacaagcacgggatagcgggcaggctttggagagagggagatgcataagctgtgagttctcgatctggtgccatctatggccttggttctgtctcggtaaaatgacaactagctcagtaaatgggtggtaaattaaatgaagtaatgtttaatacttagtaaggtgactgatacatagcaggcattgaataaatgtcttctcctcatcatctaaaaatcatgtgagctagggcaaaatggataccagtaaccctatatttctattaggaaactgagcctcaaagcagctgagttgctcaaagtcactcagttgttaagctacagagataggacttcaaccttgaatctgatgctttgggtactaccccaggtggcttctcatttcacattttgacagattaaccaactcaaaaagaatccttttttgatatcaaagttggaccacctttccacaagctctaagctagtacttggaaaaacagtctctccttattgtctagagtgaatcctatttcctcagctctgtggccacagacagctgtctgggggtatgggggttccctttcacactgttctcccacctcaggctcaatcgctgtcctctctgcagcccagctctggtaggaagcatccattcaagctcccctacatggtcatctgtttatttcagtcccttttggaccatactcccaaactggcaattcttagaaatccaattttgtctacttttttgatgactctaaaggacggaaagttagagtatcgcttgttaattaattctactttccagaagctgaaaatgcatagtcctgcttcctgaagaaaatgatcccctctaactcttctggaaacattgatataggtcagttagttggcattgtattcgccattgttacccttttaggactccactttagaaaagcttacattttttaaaattgctgtcatttaattacataggcagttgacttaagctttatttttttccattaaattaaaattaaattaagctcattattgtattagacaagcattgattgtgcccactttggttttaattaaatgctactattatttcctcctctgtagtgcttttaattttctttggtatataatttggggtaaccacaatatcagtaaattatccctcataaataatattcaaagagaaagacaaaacacactgtgaaagcaatttgaaggtatttgcttcttgtttttaatttactggtaggatatttatcagtgaatatttttccatgttgctcctttgttataaaacagggcatgcccgtatctctcttaagcagctctgacttttgcagttaatggctgacttcaagacgtcattgatcttcaaaatgtgctgactttatgtgcaacactgaagttatggtccaggggataggtgtttgaatttaagtctaagaacattatcagaaaggttcagaaaaatgcccagagaagcttacttcattttctctttaacatttatgaagcactcatttcataccaaacagtctctggggtcctggaaatgcaggaatgatagagaaccatagtctctgtccttctggtacttgtattctaaagggtaagagataatatactatatactgatcctcatccaccaagaaaacaagattctccattattaatttggcaactgtgcctaggccattattttgcaaatctagactttgagcaagatggtatattttgcactactctgctctaaatgcagcacaaggagagataacatgggaatgacataactgtcctgaacaatagacaccgtgtttccatctctcaaacccagaacagaaatggaaagtagtaagcagatcagcctgcaggccagctgagctctggggcgggaagcagtccatacagccaggaatttggcctctgtgtgataaatacttctaaggatgaccagccaagatgaaaggccagggccagaatcagtgcttgcagccagggttcacatgagatcagctcccacaaccacaaaaaggatcctaaaaaaaatgccactgaggccactgtttttcgcaagttgcagtcctaggaacaatgtcttatgactcagacccgaaccagactgcccagagattgaatctggttctgaccttgagggaggaccaaacagaggcaacataaacagccagacaggaaggggtgagcctggctggggaaggggaggacctgtaaacaaacacccatcaagcaaaaggagcctagccttcaagtacaaaattctaaaatgtaaaaccctgccaagaaagaaagccaaaaaccaatcattcgcatatgaatcctcttcagattaatagaaatttttataccagtctgaataaactttcaaatgaatacatttaagatatacttgaatagatacagggaggaaatcttttgtttaaaaagagccagaagttatgaaacagaatcaggctgaaatgaaatgagaacaggtagatatggaaaagaaccaattatacatattagaaacacaaaagatggtcactaaaataaaatcaaaatgaattaaaaataagtcttaaagtgtcagctcagcagataagatgaactctgggatggtcttgttcaaatggaaaattagaggattagaatatccattggtggttactcagaatgcagcagagagagattgtctaaatatttgaaaaagtggtttagagacatggaagataggtgcttagacatagtctaaaagggcatcagaagaggagattggaagagatggaggaggatcaatacttgggaaaataatttgagtattttctggaaccgaagaagggcagaattatttagataaaaggttcactccaactaggcagcaggattaagatacatctactcctagacaaattatagtgaaactttagattatcaaaagtaaagaaaaaaaacactaaaagctagtagaatattttttaaagggattacctataatcagaaagacatccaacctgtcattagcaacaacaacaaaaataacagaaaacagtagatcagtactttcaaagtgctgacaaaaaggagttgtcaacatagaattttgcagtcatttaaagtagtgttaaggaataacgtacaaataaagatgttttcagacttatcaggactaagagagtttaaaatttatagatctcatgaaaagactattgaaggatgtatttcttgaaggaagaaaacaaatttaaagggagggtatataaaacaaggtacaataggtagcactaaaatgaataaatttggttgctaaatttttaaacattacaattaagcattgattacaagaaatgatttagggtatctaaaaattatgaaactgaaacactagaaaaaaacaaaactggaagtggtgttcagtctatacttaaagcttgctaagttccctgacaatagaggaacactttaaactgatctgatttaataccataagtcctaaataaaatgctaggacccagatccagcagtgtgtttatatatgtgtgtgtgcttgtatatatagatatatacacacacatataaaaatgtgtgtgtgtgtgtaatgacccattaggatttgtctcaagaatgcaagaatggatcaacagaaatcatgttaagaagacaaagtcattctatcaatcaatccatctaattacctacttatataataatagtatatgatatggtttggctgtgtccccacccaaatctcatcgtgaattgtaactcccataatcccgtgggaggcatccagtgggcagtaactgaatcatgggtgtggtttttttcatgctgttctcatgatagtgaataagtatcacaagatctgatggttttgtaaagtgcagttccccctgcacatgctctctttcctgccaccatgtaagacatgcctttgctcctccttcgccttccgccgtgattgtgaggcctccccagccatgtggaactgtgaatccattaaaacctgtttttctttataaattacccagtctcgggtatgtctttattagcagtttgagaacggactaatataatatgaaaacattaataagatggagaaacaccaaagtcaggatattgactctatctatgaagaaagcaataagcataagatctaagaggaatacacagggagggttcaacttaaaatatatgtcattatgttaaacaaaacctaaatgaaaaatagtaaaaagtaatgacttgataaagccaggttgggtatgtgagtactaattaaattattctctatgcatttctgtatgttaaaaatatttcacaattaaaagtaaaacgttatttagagatgaactgtcttggggcttttcaaacttggatgtgcacatgaatcatttgagaatcctgttaaaatgtggattctctaagctgaagctagagattctgcatttctaaaaagctcccaggagataccgcctactggtgcacagactacactttgaatagcaggagtggttctcaaacttagacatacactggaattagctgggagggctttaaaaaggccctgatgcctgtgtcctatccccagagattctggttcagttgacctgaggcagtgcctagacattggtgttttttgaaagctcctcaagcaataccagtatacagacagggtttaacaccattgagataatatattttctcatttcgtacctaagagaactaagtctctgggagagggagatgcttacccaggtcatacagcttgctggggaccagaacctaatcttgtaactcctattcctgctctcttttcaagtgcaaatatttaccacagtcttttccaagttcctgccctttgggtttcctattctagaacacatgttgctcattcagtcttctcagcccaataactgcgtaggaatagcctagtagaagaaaagcaggcagatccaaggcagggctgtaaatcaaagcatgctgccattggcactctccattatctccttgcctcctatcgccccttcatgcacacactctcttggggagcttcctactgtggattttagtaatccatgtagtcgtcatggaagactaaagaactttcttatccaaagaccaggtctcagagtttctcagtttttgttgttgttgttgttgttgttgttattgttgtttttgctctcctacggcactctcctgctctgtcatcagctaaaatacaagacacttttagttcattccattgtaccaacaatactcacttctgtgctgaggacccataggatacatgccgtaaataactgaggaaaccctacctacctgacctcacctcacaccattagcttggtgcctatttaaagcatcaggtcacttttcccaggtggtgccagctgtcacacctctctgctaacctcaacctctgttcttgcatactaagccacctaatttgatacctcctccctcagatgtaggcataggcatctttccccctcagttctccttcaccttgaagaagtgggatttatgccctcactccaagtccactttcatacacagaatcctagaactagacaccagaaattcttgcaggccaaccctctattttatgaaattatggctctaaacagtaaaataactcccctgctcatggcacactgtccactggtgtatcccatcctgaccagcttgatcctacccctagcaatatctctgcaagcccagagaaagccttgatggctccaatgctactagggttttcattcccggtactggtctcaaaccaggcctttcttgagggaagaggcagaatttattcagagggatatactacaggtttgcacttttcccatttgagatctgtggtcacaaggcaagaagggacagccacaactggtttgattaggtttcctcgtaggtccactgcactgatcatattctttcttttaaggaaggcaggacatcagccaattaatcaccttctttctttgtgggaagaattgaggcttaagagcctttgaaaatcaaacagaaagtcattctgttgctgagttttaaatatcaccttgaccctctttcctgaatgtaaagtaaccactgtatcaatagtccttcctgtcacttatcacttttctgagcaggagagctgtgaaccatgcaaagagaaaaatgacagctggagagagaagtcccagaaagccatatttaaggtatacaaagaggaaaactttaaactcaaaaaccattaaaactgaaaagactttagtgatgatgtgttcaacaccagtttttagatgaaaaacttgaggcctagggaagaagctttgccaaagtcggagattctagaaacctcaatgaagacagagatgtagagtctgacagaagcacattaatcagttaaggtaggccttatctatgcaatgtgtgctgataacataatatgtataaattgagttttggtaaaatcaaattaaatgtgaagtgtattatgggagcttgtagtttccaggaatcttatgataaagactgaaaaataattgtcttcccttccacattgctcttctattttaaatctaaatttgtttacaggggagttgcttaaagccaaatatattggcaatttaatgaattcttaccgtcaagtttgttttcttactaagaggaaaatgatgaaatggtaaaatagttaaagcactgaactacaaaccaggattccaagtgctagtccagatctgccattaccagctgcatggcttgggtgaatgactgaaactcccttgctgttcgagaataatcgctcaggtctcgcgttcactaaatctgaagctggtcctcaaacacaggagcatgggcccccattacaggaatacacccacgtgatatatgagatggttcaaaggatcatgccggatctcttttccttgttagggactttgctccagtggtccctggaccagcaacctcggcattgcctgggagctcattggaaatgcagaatctttggccttgcccagacctggtgaatcagaatctgcaaggtctctaagagattcctgtgcacatttaagcattgagaagtgctggcttaaatgatggcttttttttttttttttttttttttaagatgtctgttccctgagctttctgagttcccacttttgcatctgcctgcgtgttgctggagagtgcctgtagcccccggcctgagccagccagccccacttctgctttcctccctgcgtctgactggcctctgctcttgactgctgtgtgaagtgagtgggcagattgactgacaacagcaagaagtgtcaactcatccctggggcaacggggcaataaaaagcagagacaagaaatataacagacaatcacctaggaccatacacagtttagagataaacagtcccatttaactcagcaaactctgaaaagattcacacctctccaaatgccagaagaaattataattttcattgtttttaaaataatattttactttcagttatgaaatattttagagacatagaaaataatatcacaaatattacaaacagctccatccccaccacttagaattagcagatattaatatttcaccctatttgctttgtttttctttcctttttttaaataaataaatctaaagcctcgcctcatcctccttcagcctcacgtcactctgctgaggttgctggtgttattccacatgagactgtacttttcctgtatactatgtgtccataccatagtcaatgcatattcctgtttttatcacactgtatatctcttttgcaacttgtgtttttcactccacattatgttttggggatttttctgtgctgaaatatacaaagtcacatgtatttttaaagctgctgtttagtatttagctgaaagaacaaaatgcccaggaacggttagttgaagggagtgagaagggctgtttaggaagaacaaacaactttgagttatgtgtctggtatattttaggtcaaagatttcctgtaccagatttcaagactctcatgtccttttcccagtctgaacctatcctttccacccctgagaagaatgttatcttccagatcttcctaattttgccaaggtcactgccagagcagagggcacccactcatctgggggcggtggtaggagagcaaaggaccagccatccccagacccacagccaagctgccccatgtccccctgtgtgaccctgtggtcttcaatcaaattgcctgtgactagagaaggctcaactccctgaacccagcaatacatgaagaaaatgcaaacactttattgctacaatttatcctaaaggagatttgcaaagccacatgcttgagatttatggtgtgacatccagagatttcatgcactgtatttctcatttatgggcttcaatttagttaagagaaaagaagctttctagagcaaaacaccctaaagctttggtaagataggatatttaattaattccaaaatcaccaagcgggtgaagaatgagtttcaggcctgtgtgttcaagcgtcctctgggcctgcttgttagctacctcctaggtcttggcaacagatctgtgtatgaagaaagactgaggctgtggttgaggtctcagaacctactactatctcctgctgccatcccagaaagctcaggatagggtctttccccagggcagtgtagatctgcctgcttcagggtgagccatcatttcggggacatcacaggagatgggagatgttcagggaaccctgagtgctcccaggctctagagctctctctaacacactccctttctctccaagatgatcaggctgcccagtctcacaatagcgaagacatcctttctttcataccagtctaggacccttttatgaggacacaggatgtcatggcaaggcttcattagacggcattcacttaggtctagggtcctattctttgcagggccagaaactagatttatttctgtgttcctgaagctagtcagtctctggggacatgtcttaacagtaactgaattcacaagccagctatgctcccaccctctgcacctgcccctaccattcccacaagctgggacacacttgttctccctgacctttccaaatcctgcctgcccttcaaaacccagcttaaacactgaggtcctctttgaagcctcttctcaggccacccagcctttgagtgaccgctttctttgaatatgtccatgctcatcgttgatacagatcggcatcaatcctcaatcacctggcagtgtaaactgacttgcgtatgcgtatgacttattcctcgtcagtctgtaggagccttgagagcacagcatgagctcattacttcaaagctcttctcaagttaagtacagggtaagggagtcatggaaagaaggaggagtcgtggaaagaaggccaccagggaggcaagtcctccgcctgtccaaggctctgtttccatatatgcccagtgatgggagcactcaccctacctttcctggaaggggcttgtgtggctcatggcagacaatagatgtgaaggctgttctggggctgcaaagccctttatacgaaagcaggatcattacagtcctgtgtatggtaaaacatggtttgctgattgactctaactggaacatggagtgagagttgtcctccccctagagatgagaggagggcaacatgggccatattcatatgtatgtttccattcacatgggtgtttgtattcctgttcatatgtgtgattatatcaatcctcatatttctatctgttgggtctggagccacaggcagcaaacctggggagctttgagaagctgagagtgagacagtctcttcattttttatggatggaggagcatacatcaagaaggacagtgctttgcacagctcatcaatactgaactcagactcaggaaaatagtctttttcttttttgcttaaaatcaacgtgttatctgctggcagaagtgccttccttgcttcgcctataggctcctacacagcacctccagctagaacccaagatttcggattctaaatcacattcacattcagctctgatttcctgattgccacctggtgctggccagggaagcaatttcccctaagtcttttagccatatctgaagtccccacatttcttgttgcccctgcccacacagagcctccagttccctcgcatccctctccatccctctgcctgctgtcactgtacctctgaaaccagcagccggttaggatctatcagcttgggaaccactgtgtcccaggacaagaagatctgggaccactgagaagccatctgtttagtccatgccctttaaaatctgggaccaactctgggttataaagaatcatatagcacctctgataaaacattctgaacctgagggtggggacttcctgacttgcttagctgggaaggaaagaaaatcaacatcacttgaatacatatgtgtgccaagaactccactaagcaatttcatggtttcaatctcagtaaatcctcaccacaactagagagccaagtgttgccatttattttgtaatgtggaatctcagaaagcttaagtaaatgtgtcccagaccacacagctggtatatagcaaagcccctttctctttagcatgatgctgcctctgggtagtgggatgagggggtactggccatgttagtgatgatgatgtcctttccaggctctaggacccactcagaccttccaccccaggaagtatctcttggctcctattcacgtgcccaaatcttacccagcctgcactgctcagctcaactctccctcgtggttcacttcttcctttgcacaccacagcctttctagcctgggtgtccctagtctacatctgcacctagatcctgctgctccaccccttcgcatcaactctgtgtggtctatcaggacatatgtgaatgagggtgaggcgaggtgcatggtgatctccttgaatctgctccagtgtcaaccaacgataaaagggcaaggtgatcaatacccagagagtcattagtaacaaattcctagctatacatctcacaactaatttctgcagtgtgacatcacagcaagaaatgctccaggatggaatcgaactctccacaaagcccagggctcttttacacacctaatctgtctccctggtctcttctccctgtcttccctgggcagcctcacacgctctgagtctcagcccatgcagcacacttccctgcatcctcctgtgccttgtcggggaagcacagccctccttctccaccgggaaactcccccgggtctcagggctactcactccctcttctgtgcttctaccaccgacaccctgtctcttgcaggcacggggcctgtgggtacacggagtttttttccatatacctaaacacataccatgattgtctctggagagtgggattctgtgtgttttttatttccttcttgatattttgattcattttctatatttttctataatgtatctttcctacaattatctttacaagtggaaaagaatgttggtgtttaaaatgattgtggtaattttatgtccctactgtactgtaggatcatccaggccagaaactaggccttggtttgatcttcagagcttagtgcagtgcctagaacctagaatgcgctcattgtatgtcagatgcatgaaggactagatgcatgcctgcaggcatggggaggagagggcagcatttgggttggcagctaaaggctgggtctgagccgcagcttgtgtctcctcatctgtaaagtgagcaacaaaccctggtggtcccagcatcctaagttgttctagagggagtctcctgaccactcccgcccataggcagcgctggaggagcaggctgctccctggcctgagtctctgccccactgtccctgccccatctgtccgaagcagccccacacgggaggaccaagagactttcacttcattgcagttgtgagactcgatgtcaccgttctcatttgccgcctgtctgggattttatagacatgctctctctctctgtttattgtgatggcagtttgcacaattcctcttcaggcactcagagtcttccaagcatgaagctcccagagatgaatgagcctttatcggggcctcagcgctgttcactcagtgggagccagctgtgctctaggctgtcttaaatttccagccacattttccaaacctttgactgagaggccaggaccaaagggagattggccccagggggtcgccgatctctacatagagctagcaggggcttagccactcacttcaggggaacaatgaggatggcgacagctgcctccctctagtgtggtctgggagggcctggagatgcagcctcgtccggcgggcccgagactgttcaggaatgttctccagtgtgtggacctggagattgaaggattcccttagtggagggagggattctgggaaaagatggcgggagaggcggattctgccacctacgccgtgtgaccttgggcaggagagttcacctcttggggcctatttcttccacagtcagatggtaactgtgttacctgaggggatgtggagttgggaggagacattaagtaaagggcagtcttcctcttttgctgcccccttgagctccctgaggcctgaggtcttccagcgatggtggctctggttcagcaaggaaggggtttctccaggacaggctacagggcctctgacctcgcccactgccttgcttggcctttcttctccattttccgccctctcgagttgtctgatgcttctgcaggaagtcagcggaagggctcagagactcatagggaagatgagtgagtggaggagataagaagaaggaatgcaggagcagggggtacacaggagcctggcggtttcttctgcagaaacttcaaggggttccctaactcctctcttcaaagtgaacaccagtgcctgggccctgaccagcagcaggtgtggcagccaggccccgtccagcaaaggcctcgcagtagataatttgttcaggcttttgtgcttctatcttggcttttcaacttgatctgatgaaccaccccttgctccacctctcccccacttatatcgcactagaaaatcagcctgaactaaacctccccaaatccaacagaataaaaaattaattcacgaatacgtttctgtactgcagttctgtcttgtgaaacacagcatattcctgaatccacaattttttcctagaggcaaaaaattcagatattatttctgtagagttagttacacaaggtaactggaaatctacatgtgattttaaatagagcacacaactttggcgtttggaaaaatatcaaacctcagaattaggaagtcatccttgtcaccatcagcacaaccagccgtcgttgctatttttcctttttttaagctagctttatgttatagagcatacatacactaaaaccacacgtcagtggatacatttttacaaaaggaaatcattcatggaattaccactcggaccaagatgtgaaacacttaccggcaggtaagaagccatcttatgccccctcccagtcattacagtcccttaaagatcattactatttgacttctttccctatagattagattttcctgtttttaaattttgtgtaactttatttgatagtattaactattttgtgtctgtgagatattcctgtttagttgtatgtagcagtaattcaattttgttgttgttgcagactatttcattgtataaacataccacaatatatccagtgaattaggttatccttatacttgtcttttggagcatatatacatttcttttggatgtttacttaggagggtaaaaatgtgtgtctagtcagctttagaagatattctggaacagtttgccaaagtaattgtaccaacttaactcctcccagcaatgtattgagaatgtgctccatagtctcaacaacttggtagggtccattttttgttcgtttgtttgtttttagccattctggtggataggaagtattgtttttgtttttgtttttgttttgacaaagtctcactctgtcccccaggctggagtgcaatggtgcaattttggatcactgcaacttctgcctcccagattcaagcgattctcctgcctcagcctcctgagtagctgagattacaggctaatttttgtattttttttttcagtagagatggggctttgccatgttggccaggctggtctcaaactcctgcatttccctgatgagtaatgattttgaacacctttcatatgcttattgaatatttcttttgtgaaggtcctgtgcaagtctttttacccttttttgttgtattgtttgtatttttcttaatgattttagggcttctttatatattacagacaacagtccttaagatgtatacattgtgaatattgcagatattttctccaaatctgtggcttgcctttccatttactgctttttatatcctattcaagaaatctttacttaccttgatatcataaatatattcttctatgtcatcttctagaaactttattgtttttcctttcacatttaggtctataattcatttagcattaagtagaggtataggctcatttatgttgaaaagattctcctttctccactgcattgcaatggcatctttgctgtgaatcaggtggttttaagaataggtttgttcctggacttcattcagagaagacaaacttctctgtttgtctatatttgcacaagtaccacactgttttaaatacaggagctttataatatgtcttgatatctggtactgtaagtgctccaactttgttcttcaagatcatctttgccatgctttgccttttgcatttctacgtgtattttagaatcatctcataaattgtcacacagtacaaatacacacaattctgctgagattttgattgggattaagtttaatctacagatttgaggagacctgacattctaactatagtgagtcttccagtccttaacacatgataaattttcatttatcagatcttctttaatttctccaggtaattgtttttagttttctttgtattcttgccaatatttctttaaacttactcttttgtgacttttaagtgtttttataaaagttatttttaaagattcattttttcttttgtgactagtatttaaaaatgtaatttttgttgtatacagtattgactgtgtattcaaaaaccatgttaaattcacctattgattctagttgatcattttattttttttccaaatgtgccttttatttctttttcttgccttattgtattggctaagagaactagtaaaatgtatgttagaagtggtaacagggagcctcattgtcttcttccttaattcaaagggaaagctttcaatatttcatcattaagtatgaagttagctgtaggatattcagagataccatttgtcagattgaggaagtttccttccgttccagttcctacaatggcataaaaaattttcccaaaactcagtggcaaagaacaaccatttactacactcacagattttgtggattgggaatttagacaaggtacagtaagaaaggcttgcccctgcttcacaatgactggggagctggaagacttgaagttgaggacatggaatcatttgaaagcttgtttactcacacttctggtggttgatgccaacagtagactggtggcatcactacttgggcctctcatatagtctctccatagaggctaattcaggctttctcataccatggtgagtgggttcccagggtgaccgtcctgcaagacagccaggtgccacctgtgatcttgccttgaaagtcatcaacatcggctgggtgcagtggctcacgcctgtaatcccagcactttgggaggccacggtgggtggatcacctgaggtcaggagtttgaggccagcctggccaacatggtaaaaccccatctctactaaaaacacaaaaaattacctggatgtggtggggaccacctgtaatcccagctactcaggaagctaaggcaggagaatcacttaaacccaggaggtggaggttgcagttagccaagattgtgccattccacttcagtctgggcaacaagagtgaatgaaactctgtctcaaaaaaaaaaaaaagaaaagaaagttatttagcatcattgccactgcattctactctgcaagttctgtgagagcatgtgggaacggaaatattgctgtgaccatatttggaaaatgcagtctgccacaactgctattcctagtgtgctgaggtttttcatcacgaataggtaatgaatgatatcaaatgctttttctgtatttatcaagacaactgtatactgcttattcttttttctattaatatagtgggttatatggattgagttttgagaattaaaccaaccttatatactggaataagctcaactttttgtgatgtattacctatttgatatataattcataccgatctgttaatactttgtctagaacttttgcatctatgctaataagagagattgacctgtaatttttccttcttgtagccttcttagattttgttatcaaagttatgctaactttataaaacaagacagaaaatctttgtttttctatcttctgctaagagtttgtgtgaaattggttttactgcatctttaaatatttggaagaactcattgataaagccaacttggcctggaatattctctgtagaaaagtatttaattatatatcctattaacataattaaaagtatttaattttgcatcctgttaactgtgtatcctacttaattgtgtattccattaaaatatagttatatattattttactatgctgttcatggttaccctagtgaccattagagtatatcttaaattagtatgcttgccactcctgaacaaggcaagaacctgattacttaaactccactagccaccatcctttcttttatccttttgttgtcatgtattttacagctacacatattttacatatctgaagacactattattatattaattagccaaaattcatttaaatatttccacgtattttcccttgccattgctctttattccttcttctatgactgttgcctccatttgggaaaaatttcctcttgcttcaagagcttgcgttaatatttcttttagtaagggtctgctggcaaaaaaaaaaaaaaattcagctgttttgtctgaaatgtcttatttcactttgatttttgaagaatattctcactgggtaaataattcttggctggcagtcattttctgctagcactttaaagacatcactctgttctctttcggccttccttgcctctgttgaagtcagttgtcagttttatcaatgcttgtttggaggtaatgtgtcttttcctctctggctattttaaagatttcctttctgtctttgattttcagcagctttattatgatgtgactaggcatagttttctttacatttattctatgtgggactcacagagaagtttgaagtttttgttaattttgaaaaattgtcagccagtatttcttcacatattgcctctgtcctttccctctttcctcttgtctgggacttcaaattatatgtattttagaccttttcattgtgactcacgtgtctcttgaattcttttctgtatattctgtcttttttttcttcttcctattattcaatcagggcattttctgtgagtctctcttccagtatcctaattttctgttctcttgtgtctaatctactgttaaactcatctattgaattattaattcgttattgtatttttcacttctagaatttccatttgattcttataaattcccgttttctaatgaaattctttattgctcatctgtcttcttgaacatattataattattctaaagtctatatttgataactccaatatcagacttcaaggtctgtttttatttttttccattgctttttatattggctttgggtcatttggctctgtttcctgtcctttctggtaatattttattgaattccagaagctctaaaggttgttgttcttcagagaagtttcattttcttttggcaggcagaaaccttgatccaatcaggatttgatgatttagggctgtgaagtctcaatgaatgactaaatgactgcatagaattggcagaaatccacaacttattaaaaactcgttgggaggctgggggatgatgagtgggaattttcaagaaagaagaagtcaaaccctttgtggctgggaacttcaatgtcaaggagggggatggtgccattaagagagctacagaaagggccaaagttaggaaagagtaaggagagatttcatgaccacagaggtgcagcatgcctgtgaaaagatgctgggactgaatgggatttttatctttctgagagagaacaccctgaaagatggacctaaaaataaatgcaagtgggcccttatcaaaactagtatctgaagaccacctgccactttcctgttagatattactgttgatgtcactggttctcagcaattgtcaaattaggggctctgggtattgagaaggcaatttggcacaagatagtggctggtgatcactgatttggctaattccttacattgacccaacatgtccacagatgtggaatggttctggaaactcatcttttcattatctcattgaccaggtgcctactcctccactcagactgcaaataagagcagcttcctttaggaaagcttcatagtatgatctttaccctctcagacctcattagggttgactatttccaagacatatcagccttcagcctgtgccattagcccatttatgcctagtgttccattattggaacaccaagcatgtgagtgttatttatatcctactgctcaaggtcattgccaaagtctgattgcaaaagttcaaaaaattgcaacctcaggcataaatgggttattggtaaggcagttactgtagttctttggtgtgctagttctttttttttttttttttttttttttttgaggcagggtctcactctactgcccaggctagagtgcagtggtgtgatcatagcttactgcagcctcaacctcccaggctcaagccagcctcccacctcagcctcctgagtggctgggaccacaggcacatgctgccatacccagctacattttttttcaaattttttgtagagaaagggtctcactattttggccagtctggtcctgaacccctgggctcaaacaatacaccattcttggcctcccagagtgttggattacaggcatgagccactgagctgagctggctattcattctgaaccatgaacttttcatttagaaggattgaaaagagaaatgtatgttcatgaacttattatgggctcatatcgctagcaagccaatattcttcaaatctgtatctccatggctcctcaacttcaccctaaaatatatttattaatctcccaagtgctcagcattggtctaggtcagcagttctcataatttttatctcaggactcctttacactattaaaaattattggccaggtgcattggctcacgcctgtaatcccagcactttgggaggccgaggtgggtggatcactgtgtcaggagttcaagaccagcctgaccaacatggtgaaaccccatctctactgaaaatacaaaaattagctgggtgtggtggcacgtgcctgtagtcccagctacttggaaggctgaagcaagagaatcacttgaacccggtaggcgcaggttgcagtgagctgagatcgtgccactactccagcctgggcaacagagcaagactctatctcaaaaaaaaaaaaaattattgaggaccccaaagaattttgttcatgtgagttatatatatcgattcttatcatgttggatattaaacagagaaattttaaaaatatttacctattcatttacaaataataataaatatgttacataacaatattggtgtaaataacctattttaataaacagtaaccatatttaccaaaactaaaataaatttagagagaagagttgttgtacatttttgcaaatctctctaatgtctaacttgatagaagtcaggtagcctctggaaaactctgtaatatactcatgagagagtgtgtgtagaaaagaaaaatgatattttagtattattatgagaagagctttaatcttgagggtccctgaaaagatctcagggcccccgagccacactttgagaggaactggtctagtggataggcttttataccagaaagaatgagcagattccaagctctggtcttagagcaggctcatttcttaaaatcatccttgtaccttttaaaaccagaattaatagagaatgtacttggactccatcagatggcagaaaatgataaactaagtggaaaaggaagactaattggcttatgtaactgaaaaatctaaaatagtgaaactaggcttcaggctctgagggcttgttcactgccatattcccaaggccagcaacagtgccaaaaacatagcaaatattcaatatgtatcttttaattaattaaacaataaattagtaactgttttcaggactctttatcctcaacttggcttgccatttttttttttttttctgttatcaataagactctccataagattgctcattggaagccctggtcaaacaaggctcttggtcctcatgatcccaaaacaaaagtcatcccttccttcacacagcatgtcagtatcagcccttcttggatcatgtgtccaagctgtatcaactattgtatgtgaggtgaatgggtattgccagcttagaaggggaggaggggtgaaattattaacagccttaccagaaacaactggagatgcggcagttcccaaaaaagaagaaatactgatcacacatcacacaaaattacagatgtccactaaagatatcataataacccatcaacaaatggcttatccaatcaagtgtaaacacaaattatcagatgtaaaatatgtgctctaatcacttcaatgatccagagaactgtcttgcagacaagttaccaactgagtgattgatttatgattattttattagttttagtcagcctcaaaacaaactcttcagcttttttctacctcattttcatcaaatgtaaaacttgtgagagcactgttatcatatgacacaccattgagaagccatcagcaattgcctgttacttacaagaaacagtctcaaaccctcaaggccaagccctttaattcatcacaatggttccatggttcctagcctcttaaaattgaggagccctttttaatgacttccatgaatgagaacctaattgttagtcataaatattgattgattaaaaaacataatgacattttagaatagatttccatgtgatagcacccatatgtgtttgaaaattattgtgcatatatttgtgaggcatatttgaaatgtgttctccagataaagcttggtgagtgtgagtgtgtgagagtgtgtgtgtgtctatgtgtgtgagttagtgtgtgtgtgtatgtggttcccatgactctggacatagaaacaatagatgacgggaactaagatgtcaacacagaggcttgggagattcttttctgaggtctgtactagtgttttcacggctttttaaagaagaaggaagaaatcaggccacatgatgtccagaagccctggaaccatgaagagcttcagtttactgaagtatttgtttgtgattccattttagtttacctatgttttattaactatatctttcttttttaatataattttggtgggtgttctagggtttttcatgtttatcttaaacttctgacaagctgccttcaaataatatgactatgtatagtataagatctttacattcttgtatttccaatctctacccccagcctttgtgctattattgtaatacattttaattctacatatgttataaactcataatatattgccattattttttcattaagcattcaaatcttttaaagggattaaaagtgagacaaaatgttttttaatttgcctaaatatttgccatttctgacgttcttcatttctttaggtagatccagtttttcatctgatatcatttgccttctgcctgaagaactacttttaactttttttgtttttgtttttttttgaaatgaagccttgttctgttgcccaggttggagggtagtggcacaatctcagctcactgcaacctccacctcccaggttcaagtgattttcatgcctcagcttcctgagcagctgggattacaggcacacaccactacgcccagttaattttcatatttttagtagagacagagtttcaccatgttggccaggctggtctcaaactcctgacctcaagtgatccacctgcctcagcctcccaaagtgttgggattataagcatgagccaccatgcctggcctacttttaacgttccttatagtgaaagtccctatagaattttgtctaaaaaactatttttcttcattttgaaaggatgtttatgttgaatatagaatcctaaattgacaatctttttttcttttaacactttaaagatattgctctattgtcttttgacctgtgtgacttctgacaatgagtctgctgccattcttatatttggtctctgcatatattgtatctctttttgtttaggtaccttaagattttcttcttatcactcatattaagcatttagattatgatggatcttgatgtaattttctttacgtttcttcagattggggtttgttaagcatcttggctctgtgaacttaaagttttcaacaaatttggaaatctttgtgctattatttcttcaaagagttatcctcccttctgggattccagttacacatatattcgactgacattgtcactgatattctgttaattttttccagtctttttttctgagcttcattttggatggtttctattgctttgtcttcaagtctaatgatctgttcctctacaacaaggtttctcaactttgtcactattaacacttggtgctagttaatactttgttgggggagctgtcctgtgaattataggatgcttagcaatatcctttgtctgtacccattggatgccaatagcaccttcccctcatttctgacaacaaaaatcacgtcctcacattaccaaatgttccctagtaaaaaacgggcccctgttgagaaccactgccctacactctctaatctgcttttagtcccatccggtatattttttatctcaaaaatttccatctgggcctgtttcagtctttcatttttcccctgatttgcccatgtctcctttacatgaaggcacacacaggcttctgttctaccacttgcttttataaataaatttgtgtttgaacacaataatgcccatttgccagtatattatgatggctgttttcatgactcaacaggagagttgaatagttgacgacctgcaaagcctaaaatatttgcatatttatactccagttctttatggaaaaggtttttggccccctgctttatattagtaagtatatttataaggtttataataagctgttctaagatcatcaaattctattatcgctttgacttctatctctgtttccactgagtgattatcttcttaattataggtccaattttcttcttttttgaatgcctggtaacttttggttagatactagacattgtgattttatatcatcaaggctgaattttgctaatattcccttaaagagtgttggattttgatctggcatgcagttaagtaatttgtaaatcagtttgatagtttcaaagattgctgttaagttttgctgtgtcagactcagagtagcctttattgtgggactaatttaatcctaatactgggaaagtgtaacttttctgagggctctactgaatgacccatgagtaactagatctacctactttggctggttgggacacagactgttcatagccttggatctaggaattgttcagcctgatgatttctggtactgctttccttgcccggtggtagttttccctcatgcatgcatgaattagtactcagccaaagactcaaggggacgcctttacagatttccagaacactcatattctctctctcccctacatctcccatcccaaccttgacttagtcaccaagctgtgtttggttttattctctctgcatggcaacctggaaactgcctccaggcaataatctggaaaaattataagtgtcacttcatttgtttcctttctctcaaggatcacttgtttcccttctctcaagtcttgtgctgtctgttgttcagtggctgaaacccaccattttttctagatttccagctttctatttctttgtaacatgagagcaatccctgtagcagttaatcctcatgagccaaagtagaagtttttgaggagctctgaataaaccaaagaacagactttcatattaaaacatattttcagtatgaaacataccatatctactgtgaacagcagtcatcattttctgtggtatttcaagtgaatggaatgtctggaatccttcttcttgctgcaacagtcaatccaaaacaagggagcacgtaagcactaatttccttgggtatttcacatgttaagagaagtgggcatctaaaccatcctgtaaaaatccatctaaggtctaaaagaaggaaataaaattatccttcattacatgtttttggtttattattgttagcatgttagtcttaggtcggatttatggtgtaggtttttacgattatatgttataagactactttgattatacaatcagcccaaatgtgctgtaatatgttctatatatttattcccattttataggatttggatcatcattttattatttcagatgatgttacattttgctcttgtgccttgttattggctatatttataattaattggatcctaagtctttggttaacagcataaccctttttatgacataattcctatggggaaaataggaatcattttataatgatttgctttataacactgttttcaaggacacattgtagcaaaaaggagccattgctttaaaaggactctagtttaactcttgcatttcttctcagtatggtacaggcatacctcattaagatattccagaccaccacgataaagcaagtatctcagtaaagcaagtaacacaaattgtttggtttttccagtgcatatgagttttgtttactaagtgtgcaatagcattatgtctaaaaaatgtacataccttaatatgaaaatgttttattgctaaaatatgctaacaatcatttgagccttcggtgagtcagaatctcttagctcgtggcaggtctgacctcaatgttggtggctgttgactaatcagggtagtggatgctgaagggtgggatggctgtggcaattttaaaaatgacagcaatgaagttcgctgcatcaactaactcttccttttatgaaagagttttctgtagcatgtgttgttgtttgatagcgttttacccacagtagaacttctttcaaatttagagttaatcctctcaaaccctgctactgctttatcagctaagtttatgaaatattttaaatcctttttgtcatttcaacaatgttaacaatatcttcaccaagaatagattcgatttcaagatactactttctttgttcttccacaaaaagcaactcctcttccattcaaattttatcatgagattgcagcaattcagacacatctttggagtctccttctaattctacttctctggctgtttctaccacacctgcagttgctttctccaatgaagtcttaaacccctcaaagtcatccgtgagggatggaatcaacttcttctaaactcttgtccatgttgatatttcgacctctgctacaaatcaaaaatattcttaatgacacctagaatggtccttttttttttccagaagagtttccatttgctttgcccagatccatcagaggaatcactatctatggcacttacagcctaacgaatgcatttattaaataataagactgaaagttgaaattacttcgtgatcaatgggctgcaaaatggatgttgtgttagcaggaatgaatacaatattgacttccttatacagctccatcagagcccttgtgtaaccaggtacattgtcaacaagcatatttttaaaggaatctttttctctgagcaataggtctgaacagtggacttaaaatatttagtaaaccatgtattgtgatccagacttcgttgttacatttatagggcacaggcagagtagatttagcataattcttaagggccccacaattttcagaatggtaaatgaatattgtttgtaacttacaagtcaccagctgcatttgcccttaacaaaagagtcagactgtccttttaagttttgaagccaggtattgacttctctagctatgaaagtcctagatggcatctttcaatagaaggaagttttaatctatattgaaaatctgttgtgtagtgtagccactttcatcagtgatcttacctagatctctagataacttgctgcagcttctccatcagcacttgctgcttcactttgtacttttatgttatggacatggcttgttgccttaaacctcataaaccaacctctgctagcttcaaacttttcttctgcagcttcctcgcctctctcagccttcctggaactgaagagagttagagccttgttcttggttaggctttggctgaagagaatattttggctgatttgatctcctattcagaacaccgaaacttttctgcacagcagcaataagtctgtttcacttttcttatcatttgtgtgctcccttgagtaacactttttattaaaagtcctccaagaacttttcctttgcattcacaacttggctatttggtgcaagaggcctagcttttggtctgtctcagctttcaacatgccttccttaccaagcttaatcatttccaacttttgatttaaagttaaagacatatgacgcttcctttcacttgaacacttagaggccattgtagggctagtaattggcctcatttaaatatgatgtgtctcaaggaatagaaaggcctgaagatagggagaaaaatggagaatggcatgtcggtggagcagtcagacaacatttattgattaaattcactgttttattttggcgtggtttttggcatcccaaaccaattacaatactaacatcaaagatcactgatcccagatcactggaacagatataataataatgaaaaaatttgaaatattgtaagaagtatcaaaatgtgacacagagacaagtgagcacacactgctggaaaatatggtgccaatagacttactctatgcagggctgccacaaatcttcagtttgtaaaaaatgtaatgtctgtgaagtgcaataaaacaaggcgtgcctgcatgtgtatatgacttatgtcctccgctgggtaacaaatgtgcttagaacaatgatcaagtattgcattctttgtatctacaatgccttacatttaagaagaaagcagcatggcataatgctattgtatttcaaacgattttttcatgcatcaaaactctttctttaaattgtattttacatggaagcccaatttagaaaatatattaacaagaattcttctggctgaagtgagatcaggagctcagcccccacatcttgctgtgttcgttccactcctactgcaaggtagtcactaaaacctcttcactgtggagcaaggctccagggtggatgggtcaagatttgcaatgagtcaagctgagttccagctgaggatccactgtgtacttgcttagagatttggagtgagtcacataacctttctgaggctgctttttacaaaacatggattttaatcattataatacttctatatcagtcaggaatgcttttagctgaaagtaacataaaattcagtttatggtgatctaaacagagattcgcttttcttacttaaaaataagttcagaggtatgcagttactaaatgttttttagacattcagtgatattgttggggacctcagctgtttttatctttctgtcccatcatacttagcattttggcttttatttgtatgcttgttacttcagtgtcacaagatggctattcatttataagttccaggaagaaagaagaagcaaagtcctctacctctggaagttgtttgtttttaattcaggaagaaaaattctccctcagcacacttaaaaaaaaaaaatcattagctagaacatgcccatccttagccaatcagttgccaaaaataacgagtttgcaacaatcaaagatttccgcctgaggattagatagggacttatgttcccaagttttaaggaatctccagcccaacctctgaaaacatcagcgtcctgctgacagaagagagggagcagcagaggagtgtccattggtgtccgccatgtctgtccctattcctgcctgaagtttagatggctgccatgtgcttcaaatgtggatgttggagaaagtgactttcaacctataaaagcaccaatgaaatgagatcattcattatgttaacctctcggtaaattaaggagtgaacaaaggggaaaatttcaatggagaataagaatgaccttgaatgtcctaagtcagcagttatcaaagtctgcaagtttcagtgtgctgcaagaagctgtttgtttttaaggcatatgttagatggcatcagaaggattgttaatttaaaatataaattcagtcctactgaaggtggacctctaggtgagtcccaggaacttatattttgaaacatttcccaagtgacctataagcctattaaaatggaaaagtgtggtcctgtatgactgggaaccactcagtgaggcaaaagcaggtgttcttgggtagatgtgcacctacaatgggcatttgggagtatcagaaaggggaacaccaaacaaaagggcaggttgctgactggtagctgtaccttctgtttagcacagcccctccacagtgtaagcactcaatcatggcagcaacttttattcttactgacaattttctccagcaccaggagaattcaatcttaatggaggcttcagctatggttcagttgttcagtcactgtctgtgaaatgaagccactatcacccaggtctgcttgtgatagacatcattgaaactcctaatttgatccacagggaacaataggaaattcccaatgcattctgtaggtcaataagaaatgttaagcctcaagattgtgttgaaggcatttgcaagattgatgcagtatctataaagggcatggagtccctcaaatgaaagacagcccaatcaaggtgtaatgattagcgacatctccttagcccagagcattggaaagtgcagatgataaattactataaacgcttaatggaatgcttcaaagttctatgtaatattacaacatagcgtctctgaagctaagtccccgggtgtgactgagcagatgttttcctggttgattttgaagcaaattaatcaagttatggatgattattccaggctgtgtgtcccaagttacataactgtacctgaaatgattgtcaaatgtaaacaaatgtatacccaagcatatacgtttaagtttacatagctatgtgtgtgtacatgtatgtgtgcatgtatgtatatgtatacacattgtaaaacactgtgggagtcacatgttaaacacgattataggtttaaaaagtagattacatgtctccatttgtcattcttagagtctttttttcctataagctaagcacaccggtaagctttcacaaaggctattggtgagagtagcatctgagaccttcctgacttcctaaagtattgatgatagtactttcaagatgctgaaagactgtggctggacaggagaaaagtatgtgtgaaggatttttttgttttagtaccttgtacaaggcacctaacctctctaaacatcagtttcctcatccatgagaaggaaatcataataccgacatcaaaggattattgtgggaagtgaatgaaataatgtatgtaaaacacccagtacagtctgacaaatagtagactcttgataaaccactgttattggttttatttatctctatatgtagatgtgacaggtttgaaaacgtgatctgaacccaagctccctgattcatagtgttgtttgaaggcaccatctgagaaggagcaatgtaagaagacaaagagtcacgcccagacctagacaagtgtacaatagggttcagggcctcacctgggctcctgcaggaagagttcccctgagacctgcagatggaaacctgtccatacacagaggccatagatgcactgcaaatgatctggaagaagccttagagaagtactgtttggaattatcccctgaaagcccatttcccagcagcagctgaagccctccctactcctaaccgaggctcatcccttccggtttacttcttcaccttatttctgaagttcacctgagcatagatgggcagatgcagtgactcaccacccagaaacaccattcagccaggtgggtaagattccagctcctacatttcaatcgagccaatgctgaagtgttagctggcctagtggactaagtaggtaaggaaggatactcccttcacttttcagacccagagaggtacatctccccttctgttttaaactcaagagaaagttaccacggtgcctttctgctttcagtgtgctgcaagaagctgtttgtttttaaggcatacaatggagaaagcagggtctccagactggcttgtgattactttctttcttctttgagtgtggtcatcttgcagtagaaatgtcgttctattttgtctttatgtgcgtggccacttttcagttattctcccctaactgagaaggcaagggcacactctgtataaattgtatattctctgtaaagaaagaaaccagtacacgttgagcaactattaggagatggagcattattctagatatttcacatgtgacatctaatttaatcctcaaaaataaccccacaatctaggtggtaatattcccattttttattatggtaaaatacatataacataaaatttaccatttaaccattttaagggtacagttcagggacattaagtatattcatattattgtgcaatcattactgccatccaactccagaatgtttttcatcttgaaaactgtaattctgtaccagttgagcaataagtcctcattctccctctagcccctggcaaccagcattctactttctatctctatgaatttgactactctacatacctcatgtaagtggtatcatacaatatttgtctttttgtgactggcttatttcacttctcatgtcttaaaggtttatccatctcggagtgtgtgtcaaattttttttcctctttaaggctgaataatattacattgtgtgtgtgcgtgccacattttgtgtaatcattcatctgtcaatggacacaggttgtttctactttttggctactttggctgccatgaacgtgggtgtacaaatatctatttgactccctgctttcaattctctccagtatatgcccaggagtagaattgctggagcatacgacaattctatgtttaactttttgaggaaccaccaaactgttttccacagcccctgcaccattttacattcccagcagcaatgcacgagggttccaatttctcctccaccttacccactcactactctcattattttctggacattgttgttgttgtttattgataataggcatcctaatggatataaagtggtattcccaccaggctcagttttaatctagagctctttggcctcaaacttatggctgtgttccttgcacccccacaatgctaggagtgcagggacctcgggaaaaccacagagtagagagtctgtgtaagagaagagcctggttgtgtcagttctctttttcaagagccacccaaagatggaaaggcagtctctgcaacataattgcccagtcaagggcacagcccagaacttcagtctgtgcagttataaatagaagcttttgaattcccatttctcttacttctcttagtcagtcaagtggtttttgaccttttctttcttgcatccggaggaaggttccccctggggatattgtgcttgttcccttctgcagccaattagatcattttgattgtggagctaacaaaacagtccttatttgaaaactgacagtgaaagagagaaaaagagacagaaatagaagcagtgaaaagaagacggagggaaaaaagagaggattgtgaggttgatgtaattagcatggcacagcgtttcagccagttaaacaacatccatttctgtcccccgcacacaggacagcagaagtctccaagctgatcagaccacaggccccaccttgctgctctcccagggtaggagagggttttcatgtcttcgtcatctgacagatgacacagctaaggctcagaaaaggcaaatgccttcattgattccactgaaataatatgagacaaaggcaggactccagtctgctgacagtccctctgggctctcttcacactgttcccgccacctcctgctgccacaccttgtgaaagagaccaggaccaggaccctttcctcttaaagtctcgtctctctcttctgcaaatgtctattatgaaatagacatgaaagatggggcgaagaagtgaagagctggattagatgacgtctaggacccttttcaagagctcggaatgagagagagctagatttgagtttctggcttcatggccctattgtgtaaattagggccagtgattttcttctctgagcccgcttcctcatctgtgaagcaggtacatgaaactaaccgcataggacttttatttgaacaactaagggagtatagaactttaattttaatagtatataactttaatagtatataattttaactatatgtatcaattgccaattatgtgcccagtatataggcacttatgtactaggtgatgggtttataggaactctctgtactatttttgcaacttttatttaaatataaaactatctcaaaattaaggtttttggttttttgttttggtttgtgcctattatataggcatatgattagcaattgatatatagaattaaaataatattcatcaatgcaatttcattctttctactggaaagacaccccaaattttgagcccttcttgtctccttagatttggaagacagcacagcatatacaatcagatcttcgtgtctgtgggttctgcatttgtggattcaaccaactgaggatcaaaactactaggaaaaaaataaaaagtaacaatacaacatagaaaataatacaaattaaaatatagcatcacagctgtttacctagcacttacattgtattaggtattgtaagtaatctggagatgatttaaagtatatggaaagatatgtgtaggttatatgcaaatattatactacttcatataaaagacttgagcattcttgaattttggtatccacaggggggtcctggaaccaatcccccagaaatactgagggatgtgtatgattttctatatcccacagttgaaaataaattcaattctataggtcatccaagaatgggccctattttactgaattagtcttgctccaatttctagcagtctgtagagactcacatatgcaagccctcaggacccaggccttagactgtgacagttccatccggtagccaaagttattaacctgcccaccaaaagctggagaactcttttgggggagcactgcgtgtgttaatccaactattgcatttaatccaagttattaactacttgaattaaattgaactcaatcaaacatctagaatgtgagatctccatgcttttgtgtgtccctggggtatgctggatgctgtgagtgagccttttctctgaggtccttaacaggcctgttctgtttcacatcttcttcaagggatacctcaaattttcccaaaactgtgcagtccttctcctcacacttgctccatatcgtcttcccttcctctttttctttctcttttcctttatcagctcctcttttctcctattccatctttccttcttcattctcagtcttcctgtcattcacaaataaatatttaatatctactatgtagcaggtactgttctagcacaaggcagataagcccttgccctcaagaaacttgtatttttttcaaaaaaaagaaactttttattttaggccaggtccggtggctcatgcctaaaattccagcactttaggagaccaaggcaggaggactgcttgagtttaggagttcaagaccagcctgagcaacatagtgagaactcgtctctaccaaaaaattaaaaaaaaaaattgccaggcatgttggtgcacacttgtagtcccagctactcaaaaggtgaggtgggaggatggcttgagcctgggagattgaggctgcagtgagctatgctcatgccattgcactctaccctgggcaacagactgagactctgtctcagaaaaaaagaattgttttgagatagtttgatatttaaataagagttgcaaaaacagtacagagtttctataaacccatcacctaacttcaccttatgccaacatcttatctaactaaaacataattactgaaaacagaaaatcaacattgatacaattctcttagctatcctacagatcttattagattgttgccagttttcctactcatttttccagttcaggagccaatcccgtttcctgcattgcatttaattatcgtatctgcttattttcctcccatgtatgacagttcttcaatctgaatgcatctttcatgaccttgacacttctgaatagaatcgccaggtatttggtacaacgtcactcaatttgcatgtgtctaaccttttcttctgagtagactgaggttctacattatggagaggagaccccagaagtgatggatccttctcagtgcatcatatcaagtgggcatctcatgtcaaaatgtcttgtaactggtgatgttagtcgtcggttacacttgaagttaacgtgtggagaggtggcaactgatggttttctcttctgtactaaagtttctgttttctccattataattaattagtatcttatggggagatactttgagactatataaatatcctgtttctcatcatgctttcctccattgattttattatgcattgtttttgagcacttccttactcaagaagcttaccttttattaggagttagacaatgaagaagtaacgaaataaatgagatgactttaatgaaagcgttataaagaaagtgtaagagggtgaagtgagagcaaagaggtctactttagagggcacatcaaggaagtcctctctaaagacgggacatttaagctgagtcctgaatgaagaaaaaaaaaaaaaaaaaaacaaaaaaaacttgagtgagatctaagagaaacacactctaggcaaagcatacaacagcaaaagccttgaagccagaacaagccaggcctgttggagaaaaggaaatcagccaggcatggctggagtgcagggagtaaggggccaagtgtagaagacaaggaggaggaagtaggaagaaccaaatcaagtgacgtctgtaagtggggtagagagtggggacgttttcgaagcacagtgcaacctccttcgttaaatatattctcaactgtgctgtccaatagggtagtcactagccatgtcagctacttatatttaaattgttattgattgaaatcaaataaacattttaaagttcggttcctcagtcacagtagccacactttgagggtccactagtcactctgaggctagcggctgccctattcgacaacacagctatagaacaaattcatcatggcaataacgtccactggacagcgtggctgcgtgtgttttctggaggtcatttattatgttagtttctaggggatacgcaaagttgaatgagttatggcccttattctccaggaacttcaagtttaggagacaaatatgcaaataaacatagtaccagacagctcatattaagaatcacgggcatggcacagaaaaattgctgtcggatttggatgcggcactgacaggagatcaaaagaggcttcctggagaagcaggggttaaatgtctaggtaagattcttttgggttgagaggaggaagttatgtccaatggaagtttgatatgagctgaggttttcgaagacagcaagtacaagatgaggatagcaagtagtgtaggttggctgcagtttggttgtgtgtgtgtaggagaatgtgaaagggagattttagcaggaaggagggcgatagagtgtgaagggccttggagccaagctaaagagttttatctttatcccagaggcagtgggggagctgtggatggctcttaccaaaggagtaacattattgaagttgtgcttaagaaagattggtcagtgtgcagcatatgaagtggatgatggctggggagatggactgcagagaaagggtgggaaatctatttgcagtagagcaggtgtgaggtcattcctcttccagcatctatttttctgaaacctgaaagcattctcaagcacaagaagacaggctgcttgaaatataacattcagaaataaacctgagattagaaaacacaccacttactctttatagcaagcaaacatcagacccacaggatgtaattaagctcgttgaaaaacaggcactctttgtgtgtgtttatttacacaaatcagggttttgtaaactttagggctcataaaagtcacctcgagcagcttattaaaatgtggagtcctgagccccgcccccacggactctcacttcatatgtcagggatggggcctaggaatctgttttttaacaggaatgcactatgattagggtagtcagtgatctgaggaaaggcgcctgagaaacaatgcccaacctcttttccttttcagctttctaacctcaagctaacaggttcctcttctcattatttataggccatagtcctgcaaacatgaaaattgttcctctctcattatgcctttttctctcacctccatgaatcagtagacttaagagaactgtaacatattttttccatttataattttttattttatccacttaaaataggcttaaagaattacccttcattttttctttttccccaagtgctgatttccagagcttaatctatctaccctctgtctatgtatcccttatattggcgtttgtttttctttgccctgtctgccccacacaaccaaaaactctgagggcaaagaccttgttgcagtcacttctctgaaccctacagggctcagccctgtgccctggaattgtcctagttagccctggtacaattagagggctggcccaattgggaccgcaaatgttctaaaaaccctctgaattggcatcattaccaaagccacttgacagacaagatgagcaagtctcagagtgtttatgtggaatcctcagaagcatacatgaacatctgagcggttttgaacctcggtctcagaacctggcgtcccatgtgtttctattgttcgctgcatgggctcagagaaggtaggtaaaggtaggtgaaggaaggtttggtgatactgatgttctttccctgcggtcacaggagccctactgtcaaggagggagcaggaaggggacagcattttcccctttgccctttgtgttttgcttgctattatccacttccaactttgacactttgtcttcctattcctccaatgccatgtgcccacacatgatcagcacaaacaagcagccattccattagcccatcttcaagacctatgttcccaattcacaggtaactggggagtccagacagtgataattgcagacctttcctccaatttcacacaagtaaagagcttttacaatttaacacagcccctttctccaattatgtcacatttcagacaaaatgcttgagcctcaacatttcctttggcaatccatgcctctacagaacagatgggggttctgagataagagcctcctctgcacagacagttcctgtagggaggcgatgggggacagaacaaacatccgtaagccctcagcttctacagacagacccttgggggccctggcccctcccaggggctttcctgttccaagttgcatgcccaggtgaagtaagatggatctgaactgtgaatggaaatgcaccaaactgttgtgactgtcagagcccacattaatggaggccccaacacagcagctgggcagacaccaacatgcaagtctcctagtgatgaatttgccaagcagtttgaagaaaagttaggaaatatgcagccctcaatgtccaagatcaacgccaccaccttgggaagccttctctgcttccactcacttacccacccactaggcaatgaacgtgctttcctgtagacccccagaggacattgtttaggctttcactcaccatagaaaattcagattagttgacttgtgtccggtaccatactatattgtgagagcacattccatatcttatccatcttatatccctagtctctggtttctggcacttagtagctgcttaatatatgttcacctaatgaatgaacaaataaataaatcatatgatatggcatggcaagacagctacctgcagctattggaagattgtcatgcaaagaaagattgtttatggcctttgtgcaatactggatgaaatgagaatcaagcagtggatgtcatgattttaataatgtaaagtagaggggttttgtttttgttttagcagcccagtcactgagaggttgagatgagtcagctgccttgggggaagcagcgagatccccttcatggacagggtttaaaccagaaactgaaggagaataaataaagattttctaagaggattcaggtgcagacatttggaggggtgaccggtctggacacttttaaggtttcttccaaccttgagactctgtactttcaggatttgtttttattcacctgcatggctgctttattggtctgaatatatatggggatatttttcatcttccaaagtaatctgaaggcagcctctccgtttacccatggagcttttggtgggaacggtggattgacttatagtggggctgactcgtatgttgcatgattcactgtgctctatagatgtccccaaacacatatatcagtgtctgctgttccaggatgacactgttatttcccaacctgtgcaaatgcagctgtaaaaaatgttgcatggccaggcttcccttccccagagtgtagagagagagcacacaccctctggtttaacacgcccatgaggcacacacccccttttctgaatttcaacactcaggttcaagtctattaagaagagaagagaattgcaaatgaactcacattactggccaaacgaagccagcctccctcctaaattactgcgtatattaagtctgtgggctgcagaaactcctgcaccatctgtggctccctggaaaatcaaaaaggtttccagcagtttcagcacacaagcaggctctgagacttctctctttgttagagatttgattcgaactgtgtccgttagcagtgaaatacaaaaggaaaaaaagtcagtatggtatagctttgaaatattttagcaagcgccacaggaaagaataatagaccataaattgctgcatctggccttaaatttatgaagaaaacaataatgcaaaaaaccaagaatgttactgtcctttgtcatttaaaaagatagttttgactccttatcagtttttgttcaccctttcactacaccaattgtgaaactgcaacaaaggcaacatccctttctccccaccccacccccattaagcaataaattttgccgaaaaactcacacatatttgagcagcaaagagattgggaaaagttgagagtagtaaggaccccaccccatcccaaagacaagatgtgtgcgtgggtttctggttaggaaacaaagccaggagctacctggagggcctgtgccattgaacctgaggtgtgaagcggccatctgagctcaaagtgaaacccctccacctctcccccagccactctctttctatgaaaggtgctattgaatcatgtcatctcctaatagaagctgactgtggagagaaggatggggcctgactccatgttcttatcttttatgcgtgctcagaagtccaggaccaattttattctattttgcacattggggcaatcatcttggactgagttataataaacacgagattttttttttccctcctaaagccactccttgctgtgctgctcaaaataatttccccatctgacaaaagcaccacatgccagtaggcctgttctgcgtggactctctgtccgcgtcttacccagatactgtgatggtttagtctcaactctccctgcccaggtgctgctgtacctgccagagagatttctgcaagaaatcatgatgggcagtgctaatgaataatggagacgggtaggggaggagactctggctggaaggtcagctgggggtagattgtggagggtcttgagtgcctccatcaggtatctggacttaattcaaaatggcatccacctccacccacgtgtttgccaggagacgaggccccagctgcgtttacagctgactctggtggccacattgccaaggaggtccttaggggagggttggttccttactcctcttccagtgagtaagtgcctggcaccatcagttttaagtgattaatgaatgaaacactctgcttaaatgatatcaaataccctgatgaagactggaaaagaatattaagcacacagctcataaaccacacactaaactctagcttccccagcatctgcattttataaaacagctggaagggtaactaaagtttaaactcttcttcctgattcttgtgaagatacagacagcctttggccaccagatttttctaagccaacacagggacactatttgcacactatttttcatgaaatgtggtcatttacatacatttgcatagtgctttcaaaaagccttaattccaagtatgtcaaataaaataaaacaaattagtgtaatctactgccattgtatagcagctcagcttggagatcttggcagtggtggcggaagagccaagaatcagtttttaagaagctccgacaacccagatttagtgtatccaggggtcaatagacacagtaaagtctgagaacagggaactctttgggggcagggtcaagtttcaagtgtctggatagtgctagtagttgacaaatcccagttatatctcttatttaagtctcacaaaaacctgtgtacttggtagggctaggattgttaagaacttttctacaaggggatcggaggggtcaagtggattgcctagttatagcctggtaaatagtcctgccaacatgcaaacctaagacaattccaaatccaggcctcatggacctcagagccttgttgctctgagaattgatccagagttgccttgagaagaggtaaaatgtccctatttgctggttgttgtgttttcttcattttttttgttgtttgttttgttttattttgtttgtttttttgagacagcgcttcacttttttttttttttttttttttttttttgagacggagtctcgctctgtcgcccaggctggagtgcagtggcgggatctcggctcactgcaagctccgcctcccgggttcacgccattctcctgcctcagcctcccaagtagctgggactacaggcgcccgccactacgcccggctaattttttgtatttttagtagagacggggtttcaccgttttagccgggatggtctcgatctcctgacctcgtgatccgcccgcctcggcctcccaaagtgctgggattacaggcgtgagccaccgcgcccggccagcgcttcactcttgttgcccacgctggagtgcaatggtgcagtgtctgctcactgccacttccacctccccgtttcaagtgattctactgcctcagcctcccaagtaactgggactacaggcatctgccaccacacccggctaattttttgtatttttagtagagacagagtttcaccatgttgttcaggctggtctcaaactcctgatctcaggtcctcaggtgatccacccccctcggcctcccgaagtgctgggattataagcatgagccaccatgcccagcccttatttactattaatccagcatctcctcttcagacaccacactgccactgggaagcgatgtgagggaaccccctattggctctggaagagcgttacccagcctgtgatgcatctggccctaagtaattgtctttttatagtttgagacagttatttgaaagttatggtaatggggtgaaaatataagcagcttatagtttactagaacattaatcctctggggatgatttcttttcttctccgtgcatctccatgggacctttttcattgcattgtgtgaaatttatttttagacttttctccctgtgatctatcactggcccacctctgcctaattattaatttccatatttgctaagctatatagaaagggttcaagtgcaggtcaggccagattttggaccaaggacccaggaccttttcagcagaggctcaggggagacacacaatgggaagtaggagtcaaatccaaatgggctttggaagcagtcagagctgagttcaaatcctggctcctttatctttgataacttggccttggcctctctgatattgagtgtcttcagtcacgcacctgtaacccctagatgcccaaactgatgctctaagactaatcctgtaaatttgggtaagcctgtatgtggacaggcatgggcaggaccaaggagtcagctactataaccagcagccctaggatgcagaggagacttccagggccgacttattcatgagaaagaggaatgcacagtgcctagggccacagtacttttaggagcccaaggaaactttttaatttcttgaaaaatcagaagaaaaaaatgaacttttgagtttaataaaatggtttaaatatatgacattaatatactttgtatgcattaatatatgctattaatatatttatctcaattactgatgcaattgtaaaacagaatttttaattttttttgtataaaggatcccataatggcaaaagcacccagggcccccaaaagtcataacgcagccctgggagttcttgcccagtcctctgttgtctcctgggcacccactcctcctttgttcaatcctcatctgttcatttgcaaaagagcttccaaatcaggcagccttgggctgacctagctcccaacatttcatgatgcccagtgagcacccacggggcaggtcctttacatcagtgtgacctttggtttgcccagacttggccacctgcctgccctgcatcttgcaccagccagtatcattccacattcttcagtttccttcatgttcctgcccataaccctcaaccacctcaagccaagcaataaaagagaagaggggagagttcataaatggagctcccgattcactctctgtcctacccccaaaagcctccccacgtaggactgttctggcagactaaataaacattccaatggcaatcacgttgctctctactgtagtttattttatgtgaacatttgagaaaacagtagaaccaatgccaattcatatgactttctgtgactcagtttctccttttgcaaattgggcgtaacaagagcaatctggtagaaacagtaggaaaagaaataaaattacaacctggagaacgcagaatgcccttcagaagaaacatcctaggtacgtttgaagttattattagcatgactatcagtgagctcaagcctctcagagtgcctggggcataaggacttcctgtatttataaggctacacgtcagcctcctcttccttcctgattcaccatcaattgctttcaccactactaaatgggccctgagctccagttattctcagtttatgcccacaacctgtgaaagggtgagtgagccagtggtgggttaatttcaggagactagcccctttccaaccatcctgagggcctcagtcagtctcccaggaggcctgcaccctaaggggtgagaaattgggagcaagaagcaaagccagcgggcaaaggagggcagaggctgtaaggagaaaaacccagaattgtattaaacaaacaaacccttcccccaaactggaagggagccaaaagaccaaagaaagactcggtggcaagtagatgagtttatttggccttacatacggggcactcctgggcggcagcagaacagctctaaagatccagcccgcctcccatctctaagctgcttttaagctaattttctggctctttgcctactgtatgtatgcaatggaactgttttcctcattggttctcagatactctctgggaggtttgcattctcagggacacctgctccctggcaggcaccatggccttggctcacagcctggtcttcagggttcaggcagcaggcatagacccttaagtaacctgtgacactacagaggcaaacaaggagaaagaggagaagtgcaagaagcgaaagtttagttaaaaatgccacagggatgggaaaggacgccctcaaatgtctagtgtcacccaaggctgatgccttcattctctgttccacagtcatcctttgagcaggacacacaggacgtgctcccagaccccctgcaacttcatcacactgtagccaccatgtggcaattaaccttacccagtggtagagtcacgctttgtccctttcaggtttcaagttagaatcagagatcttcgacctggaagggacattgagaatcatttgtctaacactatgtttttacaaattaaaaaattgaaacccagaaacttaaggggcttgtccaagttctcacaacaaagaaatcaggactaaaatcccagatctcctagtgcccagtcgaaagttcatttcactgttaagcataaggtttttaggtgcgtacccttcccacatgcttaggatctaggtgtgcttttactctcattattttatgcatcctgacaccaaccaggcctggaaaacgtgtactacatccccatttttaccagtgaaaaagcagaggctcagaaaggctaagggagagtacccaagactcaagggagaatattgaagatcgccaggtcattgtggcagagctggaatcaaacccagtctcacttaccaatactctcagacagtgcacttccctccatcccacactgcctcaaagcctactgtccagagctctgtggttatggatattgtgaaggagcaaggattcccatccatgtttataggcaaacttctggcccaaccgcattcatgctcagaagtctcaacatttttttttttttaatttatcagaggaaagaaagtaacaatagagttgatgggcaatttgtgtaattaacaccccaaatctcctagtaccataaggtttttggattcagtgcattctcccaacagatgctctttttaccggtcaagtgtcattatcacgaggattataatggagtggaagagaatggctgccggagaccagagggtaggcaggatatgggtttgtcattagtggtcttgggtgcacttcggtgcacctatgagcctgcttcctgtgaagattttaatgatgaaaccagcgagctctagagaaggatttggacatctgcttctcaattagtgttaatttagcttgtttggaaatgatttgtgcctctacaagacaacataactgaaagttgttttctttcctatgatcataactttttactcttctcacaatgggccagatgaatgcagcagaggggcattcctgggctgcagaggaacattcctgggctgcagaggaacagtggatagtcctgttcctgccaatttggaaagacattgttgctccttagtctcaatgcaactgtaatgcccaaatcaaagtcttgagaaatgtccagccccttccaaagcacttcttggaagcaggtaattggcccttttatggttgttaccccagggcagatgttaaggtggtatacacagctacaatcatgctggttattaaaacattgacatatttccagatcaattgaaaaatagccatttctccaagccctacaagtgctccatcacctcttcagcttccccagactcagggatcccagatgagcactgatcaagagcttccctggtacccaggcacccacaacctgccagtcaggccttcatggcccctgcatgcctgccccattcctacatgtcccccagccagggcgggccctgccctgctaagggagacaccatcccttacagtgacaccgagccctagcaggctaatgcccactctgtgattcccccagaggcacctaaagtgattgattgccaaatggttttaatggcactctgcctttgagttcctttgtgaggtacacagggagacccctgctctatgctcttcacaggggcccaagcagatgtgctgtattcttgttggctctgaagttgacatagacagatctagagtaggttctgcccctgagcagggcgtgccagcactacctcttacagtgttcaggtgagcaatgctggagcctgatggccagacccggcctgcagggacaaactgggttgagtgtgatgggaagtccaagtccaagttggctattgaagccggagacttggccagccagagcctggaggcacacaggagtcaggaaaggcaagagggagcgagaaatggacaaaatctgatgttcttgcccctcaaatcagagtccatacacaaggatctgtgagttctctatgataatttaaatgatctcatattgatgataatctaaaagaaagtcatttttgcctctacctttgcgcttgtgttctggatcactttggcatcaaagagtggtgctttaatagttatcagacttaaagacagaagcaaggtagacttgtcaagggttcatgcccttgaaggtcaaatgattgcaggggaccctgacaagagaagggtttgcagcagttgcataccaaaaactcttagaagaattgattcatcagccaggcactgtggcttatgcctgtaatcccagcactttgggaggccaaggcaggcggatcacctgaggttgggtgtttgagaccagcctggccaacatggtgaaaccctgtctctactaaaaatacaaaaattagctgggtgtggtggcagatgcctgtaatcccagctactcaggaggctgaggcaggagaattgcttgaacccaggaggcagagattatagtgagcggagatcgcaccactgcactccagctacttggcaacagagactccgtctcaaaaaaaaaaaaaaaaaattgattcatcacgtaacctacgtaacatgggcatatcaatcatctgaaaagatgtgtattagtggttttttttgtttttgtttttgagatggagtcttgatctgtcacccaggctggagtgcaatggcacgatctcggctcactgcaacctccacctcccaggttcaagtgattctcctgcctcagcctcccgaatagctgggattacagacactcaccagtacgtccggctaatttttttttttctttagtagagacggggtttcaccatgttggccaggctggtctcgaactcctgatctcaggtgatcctcctgccttggcctcccaaagtgctgggattacaggcgtgagccaccatgcccggccaaagatgtgtattagttttccatgattgctagaatggatggcttattcactcaaagttctggaggctagacattcaaaatcaaggtgtcagccaggccatgttctctctgagactctgggtagaatccttaccacttcctagcttctggtggtggccgtcagtctttggcattccttgcagccacatccctcccacttctgcttctggcctgacatggccttctctctgcacgtatctcccatccttttttttttttttttttttaacaagaacaccagtcccgttggatcagggcccaccctaatgacctcaccttaatttgattacatctgcagagaccctatatgtggtcacattcacaggtgccaggagttaggatttcaacacatctttttggaggacataatataatccattatagaacctgagtaggagccgtctattctctatctgtctgtcctgtgagcagcgatattgtttcagcaaatagcaccttccatcgcattgaattgatgtgttaatttaaacagtatggttttatacatttatatttattttttattaattattgaattatttttgtttggttttaatagtcaagtaagagctataagcataaggagtttatacccacgtttgtgctttacattttaaaataatatgagaatacataatttgtcagctcaggcagtccttgacaattgtcacctgttctatttaaagcagctacatgttgtttcagtactagaaaccctggagtccagatgaattccagatgtgagaagagactgtgccttttctaagcttgataggtggtcagatttcaagttcctaaggacctgtgtactctcaggacttgcagatgtcctcgaggtaaatgttgaattttgaaatgacctggagccaacaccagttctctcagcaacaatatctgggctacagaggagtcagattctggcttggagtcccacaggcagggctggtctggagatagccaagctccagaaagatgggtggcccctggagccctagggaagaactggcatctataatagaacaagcccacagtgctctcctccccaaatcagtaggagcgctgggggatattgtaacctactccattgaccctcatggccctgaggacaggtttgctctcagcaccccagcaagacagccagaatgtcagtctaaggtatttgcttcatgttctttgatcagaaatggatggcagacactagtggaacttcttagctccacctacatattcctgaaggcagccctctgaaggtcaggtgggatctgggagagtagccttcaaccattggcagcaaattactgcaaatttctttgctttctatttgaacatttctttgagttttgtttgaattttaaaatgtttgaatctcatgctttaaaaaaatattaaacttgtcttctcaaaataatttgattaaaattgatgcttctgaaagatattccaggtttttcctatgtcatggtgcctgctaccagtcttattcccttctcacctgcaatctccaattagtgcagcactaaataacaaatagctatgggacatttttcttctatgaccagctcatgtgaacaaaacactgtatatggaacaagatgacctggttcaaactctaatacttataagatgtttgaactttgaacttacatctaactacactgagcctcagtttcctaatctggaaaatgagtattaatatgataatacctgcaggtcttcctcattggtggtgttatgaagattgaataaaataatgtcagtctaaggtatttgcttcgtgttctttgatcagaaatggatggcagacactagtggaacttcttagctccgcctacatattcctaaaggcagccctctgaaggtcaggtggaatctgggagaatagccttcaaccatttgcagcaaattcctaatctggaaaatgagtattaatataataatacctgcaggtcttcctcattggtggtgttatgaagattgaataaaataatgggtataaaagcttttcaaaatataaatgactgtttgaatctgagttagttttgccgcttgtctatgcccttcagccagagaccaccaaagataatctatagttaaacaagtttggttgattactaattgtagcatgaagaataaacatgtagagtgtctcagtaagagggtgttagaaagaacctattatggaatttgggctttgttgggtaatttgaggtggggcttagggaagcaggactttgctctgaattggatggtgtcattaggtagcagcaattctataattgtttatctcaataaacctccattgagaagaaagactagaatgaggataaagctgtatttggtaaagaagcaggagtaactcattttggtcaagagaagatgtttggcattttggaggtaacacagtgatcttatctttgtctgtacttagaagtggcctcgctttgtctcattttatcaagatctcagacaagccttgtctgaacttggtattctgcattctgtgtctaatgggagaatcacatggcctacctgtgagtcaggccagcttctgaatgtcagaagctgctcttttatttctcacattacgtatgttcaaaccaacagattctctggagaaacatgggcccacgtgggggttcaaaaatagatgtactcagcatatctaagagacagaagaaagaagggagggagaaaaatgaggaaggaaggagaaacataaagggggaaagaagttgggaggctgtagagtgttcacatgtcctccaagactccccaagagctctggaagaactaaaatggatcgagtgatttccgcttctaagaggccaccattagaaggcagcatcacatggttggccgagaaaacaccaacaccatttgattcccttaaagggcaccacttgaatcaaatcctgggactggttgtagatttgacctcttttggcacccctcactacctctgtcactcctgctgagttccatgtcatacagatcttcgggcctgtgctccctaagtggtttgaggggaaggattccagagccattttctcctctggctggtctgtgatcacagtgcacagatgttccataaaactttaaaatgactaagccatttatctctggtggctaatcaagcaggtttaaagaattccgaggtatcaaggaaccacaagtgcagagtggaaattgaattgtggtcacagatacgattgggccattaaaagccaaacttgatgggctaagagagagttatcagctgatgagcgaacatcaatatgatagcaaaaaaactggcctctgttgaaaggggcttttctcaaaggcctcatgatacccagtagaagatgaactcttgatacctgctgtctctctgttaatagcttcagttgaatcagattaatttaaaggggctaatgaaaatgatgtaggagaagagtttggaggtaataatttgatgcaaaggtattggcttaaagatgatgacgttataaaaccagtcccctggggaataggcagagagaactgggaagtgattaggaagcagggggttcccgctctcaagggttcttgcctcccctctgccagtgcaccgtgcctttctcagacaggagcatgtggcaatatcagctgacatttatcagtaagaattttatcagtaaggttcctggggaattgaagtatttgaatacatggcacacggtaggctcaatatctattttatttaatgaatgaatgccaagtagtagagactctttgtttcctttattggttagctcatttccactgtgttttgggtaaagacccaaatcttaaaatgatactggaatgatacttaaattccagtatcatttgcttgatactggaatttctaaggagttccagtcttcccaatggttttataatatttgtatcttgcctttttctttcatttccaggaaaagttctccagatgtgcttacagtgccttctttgcttcttcctatcattttttcgaccaaagttatactcaaaccaaatcttagcattatgaaagccatgtcttatacagaaaaataaaaatccttaagacaaaggtggaaaattacgtagttaacaagtgggaggtaaggtgaccaaatggactccactgttacttctttaagggtcagagttacccaggtctgtctagctggctgctcttgtcacagttcctcagtcatattggcataagggagaagcttgtgttgcttttggtgttaaacatacctgtattcaaatcttagctctagctttttttttttttaaaccaccgtgaccttgaattgacttcataaaattttcccaaacttctgtatttttatgttttcaggaaaaagattgggagagggggtaatatttgactgtgttgctgccaaaactagatgagaacgtggatatgaaagcacctggcattgcacctgcatgttcaaactttttttttaatcttacgaagtgctcagttttatcctcttgttggtggcatctggcagggctgcctctgacagaggcatataggcattactcttgaggtagactcagcagagaacaacctggatggtgctgaagactcctaggagactgttgagagatgagttttgaagttccagtaggagggttcatggttcctggggaatttaattatttaaatacttgccacatagtaggctcaatgtctgttttgtttaatgaatgaatgacaagtagtagagactctttgcttccttcgtttggttagctcatttccaccgcgttttgggtaaagacccaaaaatacactggtaggaggggtaatggactgctaaactgagaggtcccaagggctttgcttgatatgggtcagctgcattcatgaacagccctgacctaacaaccaggagatctgagtgctttaaataattgtgtaaccttgggcaaatcagttcaattctctgaatttcagtttccttatctatgaaatgacagctttgagctagaagatttctattattccttccagttctaatgatctgtgatccaaaattgactgttctcttgcaaatggattccccatggacctaatggaaaaaggcacaatggcctcatcattcaaccctgagctcagcaatgtccattagaattgaaaggcgagcctccattgaaagtggttattatacatgttgggggctgatcaatgcctttcctttgttggtgaagtgttattttgataaaaacttatcttatgaattttaatcatgtagattgtcagtactcctcaaactctaaagaccaaaccattgttattacttattgactgacttacagccaggtcaaagaaacaagtcccaaacactggcagctgaaatatttatgatgcaactagtgttgcttccaagtaatgtacactgtattcaaaaaggaacacattatggcaagccagggcttaaattgatgaacgtgtttccattttagccatgcaaattatgcatcagagaacaatcaatatgaatttgatattcccaggagacaaagcaggcgtgggagtgggccccgggactaattctactttctcatctttcagaaaaggaatgaactatcctcaacatactaccctagcctccgtctcatttgcattaggtcattatgctcttccatccaaaggacaatatgcccacttggagtgtatcatatagatatataagattgagattaggagttagtttcttaaaatattcagttaaaaattttatgcattccctttccaaccaaggataataccgtaaatattctggtacaggtgcaagtggtgaaatgatatggaaagcatcctgtataaaactccaggcacaagcaagcatccccttctccatgctttgccttttcagtactttacaaagcacattgactggttccaactcttgagagattggtgcaaaaaaactctgagttttaaaatatcttgtagatattccattaagccgggcctaagagatccagaaagtcttaattgcagacaggatggatgtgatatttcttttgttcatttatttgttcattcattaaacagtatccattaattgcctttttatgccaggaaataagttcctattatagtctgggtatacccatacccatagattccattttccttccagaattgacttattagctgtacctcatcatttcatttttttttttttaagttgacaaactatgactcccaggccagccacctggttttgtaaattttattggaacacagccatgcttacctgttacatattttcatgctgcaatggcaaagtctagcaggggatgctatttgggctatattgccctcagtgattaaagaggaaagagatacattttcttccagcctttagcaaaagagcaaagtttatcaatcagtgagcaaacacttattaggcacttcagcaaggcctcgaggtaagcacttggggggaacaatttggtattctctcagatatagtatcaagcctcctaatggcctcatgtttcctcctcaaaaccctctagaaacttgccacctaaagtgtggtcaacatccgtcttgtctgggagcttgttagaaatacagactctccagccccaccctacactaatgaatcagaatctgcattttaacaaaattctcctgtccacttctatgcatgctaaagtttgagaagcactgctgcagaccaaaagggcctgagaaacaatcacttggctgatcaaagagtattcacagggggcatcctgaagtccctactatgggttcaatagtgtcataacagcccctagttattgttaaactttgcctggtcactttggaaataaatagggattatctctaagggtcctataaagaggacttttttgttaattgtgtgaaatcatagatggtacagctgggaaggatcttattgactatctatttcctgctcatacagataaggaaacccagagcagggaaatgatcaatagctcatagctagtaagtatgagagctggagttagaactaaggtttctgaatgtattatctagtgcttactcacccccacttcactgagcagtgaagacagggggtgaagcacatgtttagacaaatgtttagatgaatcactccagatcaattgatgcgcaatggatccatcggtttaaaaaaaaaaaaaaaaaggaaaaggctacatctagtttaccattgggttatccattgcttagggtcaagttgtcaaggggagaaaatggaattataggaacatggccagtttgtaccacaattagtgccatagcatgagtcagggacaatgtggagactgaccaagtttaatcattaaataaatgacctcgttatcatacaaatctgaggttgattgtccatttgcattgctataagtgatacctaagacggtaatttataaagaaaagggctttatttggctcaagggtctgcaggctgtacgaacatggaaccagcatctgttcggcttctgatgaggcctcaggaagcttacagtcatagcagaaggggcgggggagcctgcgtatcacatggcaagggagagagcaatgggaagatggtgccaggctcttttaaataaccagatctcatgggaactaataaagtgagaactcaattgttatcacaaggacagcacaaaaccattcatgagggatccaccctcatgacccaaacaccttccactacgaccacctccaacattggaggccacatttcaacatggcatttggaggggacaaaacatccaaagtatattcttttctgatatccaagaaatagttatcagagagaggcctacctgtaacctaggcttcaggggttgaggtggtagcagggcaggggcattctcctcaaagtttcttctgtgctaggatacactccctcaagccctatccttcaagggtcagctgaaatactgggatgggatgggatgggatgggacgggactggacgggacgggacgggacaggatattctctcctctactgtcctgggagctcctaaagatagagtacacatctgacttgtatctgggtccccaaagtgcctattacctagtaggccctcaatcctatttgttttgtggaaccttttgggagaagctttcatagttcacagattgattcagcttccatcacaatgactgcaggagctttgtggaaccccatatctgccagcaccatcaccatgacctagttatcatacaaatctgaggttatagacagacctacatgaacacttacacagtccctgttgcagttcttgcttgcagtggcaatggtatacatatttcatatcctgacctctgctgagtcaagggacaagcaggcggtttgcatagaagcctgggcaaaaagaaaggtttgacctccttgatttgtcagtctccatgtgcctagaataagtcattataaatggaaaaaaataaatcacttcagggatttttatttgggacttaattttagctaaaattcgaatcagttggctacaggagtcaagaggattgattcccatctcctccttaacccattagcctgaatgttctgtcttgcacactgtggtcctctgtcttgtagacacagccttaaatacacattaacattaatgactcttgggagatacaacctgagagcacgttatcttcccatatttatcatttggttagattttcaaacctcctaggtccctttgtgtcttatatcagaaatcatttgattgaatcacctaaatcaattttcctttactttcaggtagcttactgttgtcctttgtagctcttagcttatactgattctcttgtgtctggcatctccaggtctgtctttggtggaagtgattatgtttctaagaactcttactcttatccctgagatacagaagaaaaaaaaaaaaaaagcctcgccttgccttctagtgcagcctctttgtcctcaccttgcatttcagcccagctgcagtcaatctggaatgctgacatactgtaccaggcttgctcttgctcggctgtttgccttctgaagttcccgatcaaggtgtccaaaaacacagggtgttaggaaatttgttcaaatcaaagtgagtacataggaaagcatacacagtatttggcctctgcctgccccattcatttctttgttcattcattaaacagtattcattaattgctctctttataccaggcaataagtacctatcacagtctgggtatgcccatagattccattttatctccagaattgacttactagctgtatgtcattgttctgttttttaagagttgctctagggcatgagtgggcaaactgactctcaggccagccacctggttttataaataaaattttgttggaacacagccatgcttatctgttacgtattttctatggttgtttttatgctaccatggcaaagctgagtagttgtgttaaagactgtatggccctcaagcctaaaacattgactatgtggccttttacagaaaaagtttccctatcattggtttacagcatcctttgtatatttttagttggttgtctttttattattgagttataagaattctttatgtattctagatacaagtctcatcagatatatgacttgcaaatattttctccccatctgtgaattatcttttcagtttcctgatggtatgctttgaagcaacaaggtttaaaattttgataaattctaatttttctatttttttattgctgcttatgcttttttgtgttatatctaagaatccattgccaaatttgaggtcataaagattcactcctatatttccttctaagagttttatagttttagcctttatattgaagtctttgacaactttaagttttatatcttatatgaggtaggggttcaacttcattttgcattggatatgccatttccctgaaaaatttttttatagactattctttcccccatggaattgtcttggtaccctctcaagactcaaccacaaatttgagggtttatttcaattctatttcatggatctgtgtgtctatcattatgccagcataacattgttgtagatgcaattacactgcagtaagttttgaaatcagaaaatctcctacttggttcttcttattaaaaactcttttggctatttggggtccctcgaaaattttatatgaattttaggatcagtttgtcaatttataccaaaaagttacctgggattctgatagggattatatttaatctattgatctatttagggattatcatcatcctaacaatattaagtcttctgctccatgtctgggatgttttttcatttatttaaatcttatttgatttccttcaacaatgttttgtagtttttcagagtgtaagttttgtacttcttttgtaaaatttatttccattttattctttatgctactattctaaaaagaatttgtaatatcatttttgaattgtacattgccactttatagaaatataattgatttttggtatactgcaaccttgctgaacttattagttctaatattttttagtgatttcttagaattttctatacacaaggttatgtcatttgcaaatagagatagttatccttctttcttttcagtctggttgctttttatttatttatatttttgcctaatttccctggctagaatctccagtataatgttcaatagaagtggcatgagctgatattcttgtcttattcctgatcttaaaggaaagcattcagtctttaataattaaagtataaagttagctgtgggattttttgtagatgccctttattagcttaggaacatttcttactattacttgcttgttgactgttctgtcatgatacggtgttcaagtttgttgaatcttctttctgcgtctgttgagatgatgctgtggttttgttttctactctactgatgtggtttattacatccattgatttttgcatattaagtcaatcttgtaataaagcctaattggtcatggagtacaagtctttttatacgttgcttgattgagtttgctagtattttgttgaggatatgtgtgtttatatctataagagacatattgatctgtagatttcttttcctgtaataactttgtctggttctggtatcaaaataatactgacatcgtagaatgcgttgggaagtgtttcctcttcttctattgtttgaaagagtttgtaataattggtattattttttaaatgacataattcagtagtgaagatatctgggcctaagattttctttgtaggtaatttctttaattactaatttaatctttttatttgttatgtattgattcagattttctatttcttcttgagtcagtttcagtagtttgtgtctatctaggaatgtatctatttcatctaagtcatctactttattggcacatagctttttttaaacagtattcctttataatcctttttatttttgtaagtttgatagtaatgtcccctcttccatttctgatattaatgattcaagtattttctcttttattcttggtcaccctaggtgaagatttatgagttttgttgatttttgcaaagaacaaatttaagttttattgattttctctattttttctattctctgttttattaatttctgctctttgttatttacagtctctgcatgttttagtttgctcttatttttctggtatcttaaggtgggtggtgaggttattcacttgacaactatcttcttttttaacgtagacatttacagctataaatttctctttaagcactgttttagctgcttaccatatgttttggtatgttgcatctttgttttcatttatctcaaagtatgctctaagttttcttatgatttctcctttgacccactggttatttagaagagtgttgtttaattttcacttatttgtgaatttcccaaatacctttctgcattgatttctaattttattctattatggtcagagaaaataatttgtatgattttaattcttttaaatgtattgagccttgttttgtgacctagcgtatggtctatcccagagaaagtttcctgtgcatttaagaagattttttattcatacctgctgtagaaagcatatagacagattttgggtttctgtttcccccattctgacaatctctacctttttattggattgtttagtccatttgcgtttaatgttattattgacatgcatggatttttatctgccattttatctcatttttttctatatgtctcatgtcttttgttctttttatctcatactgttttctttttttattaagtgaatatcttctagagtaacattttaatttgtttaatgatttttttctcgacattctattgagtttttttcttagtagtttctctagggcttaccatatacatcttaacttattagaattgattttagatttatattaacttaattccagtgagatacagaaacattgctctcatatagctctattcccctccactttttaatgctattattctcatacatattacaactatacatgttataaactttaccacaaatacattgttataattgctactttatataattttatgtcctttaagcttgcaggaaaaaagaagagcaagtatatatttatagtggtagtgatactaaccttcgtatttaccatttctcttaaatttttttgtatgttaaaattactatcaggtgtgctttccttactcaagtatgccttttctgccccccccaatcctttgtgcggttattatcaaatatataatacatttctatttattttaggcccagcaatacaattatatacctattttttatgtaacagctttttttttttttttttttttttttttgagacggagtcttgctcttttgccaggctggagtgcagtggcgtgatcttggctcactgaaacctctgcctccctgggtttaagcgattctcctgcctcagccttctgagtagctgggactacaggcgcaccccactatgctcagttaagttttgtatttttagtagagatagggttttaccatgttggccagtatggtctcgatctcttgaatttgtgatctacccacctcggcctcccaaagtgctgggattacaggcgtgagccaccgtgcccggcctataactgctttttaaatccattaagagaaagaaggacaagaactatgtattaaaaaagtcttttataattacatagttacctttcttgatgttctttggtgtgtgtgtgggtagggggtgtctaattattgtctggtgttactttcagcctgaagaaattcctttagtgtgtcctgtcagtaacaaatctcagtttttgctgatctgggaattttttatattgacagagtttttctttcagcactttgaacatgccaccccactgccttctggcctccattgtttctgatgagaaggcagctattaatctttttgaggttgctttgtaagtgataagtcatttttctcttgctgctttcaagattttctctttgtctttcagcttttttaccatgagtctgtgtgtggatgtatgggttgaattttgtctcccaaaaagacatgttgaattcctgaccccctcctacctgtaaatgtggccttatttggctttagtgtagtctatttccctgcagtgggaagcctttcatgtcattctccagagggcatggtgtgtgtgatcatcctaggatgacactgcttttaacaagtttctctttgactgtttatttccctgatctctgttaaaccaactgcttctgctggcatcacatccagctgtaggcacttactaattgtcagctgattattccattgtttttggcaaagctctggggtaaatgttgcgccacagtctgatccaattaaatgtgagtccctttacagacataatttttgaggccactctttgaaggttttttctcactccagcaggttcttcttagctatctatttccatggttctctctggagaaatagctaaccaactgtttagcttgttgtagatagtcatgaaactgccagtctcctctcagttgtttgccacaaaaatcataattgtttgtaagagcattcttaggcttgaactccctcacaatctgatataaataaattctgttgctttggggagaactttgaagatctctattcttatggccttcttctctccctgggcaaaatctctgagccacaggtctgaggcagggagcaagagattgtggcccacttttcttagagtgacaccctacattatggtcagagtgctgagcagggtaagtagcctctcttcttctcaacatgtctcttgcagcttagaacatccatcctacacatgagctgtggtgagggcaactggagccccagcattatcagcatgacatgcctgaggtagagactccactctatgagggagaactggatagagtaagggatccccaacttcttggccatgcttacctggagtttagcctctgccttgtgtagctggggaaaattagaaatgctcatagcctgtccctcctgggtaccaggaggtaccagacactagatagggaattaggggccgggggaaagcctctcttggctaaaccttcctggaatggaatttccattatattgagccgggaggggaaaagagagagcaggtcatggtcccaatgttacaaattctcactgtccttaatgagttttagtagcttctcttaattttttttcatttgctatattcccttgggacaatttccaaagactttaagtgattgtgtttctaaaaaataatttttaccagttatgcttgtttcactggagagcagatctgcagggctcctcattcccccattcaaaagtagaatccctctgcaattctttatttttctctctctgataccagacagtgaatgcctttagaatagggtctgtattcaaataataatttctgcctacatttactctctgcctggaggtctgtgaattttatttatggtaccctcaatggaaagttaattattatcaccattccactggtgagaaaaccaaggcttacgaggttaagtgatttgcctaaaatcttaccattagtaaatgttggttccaagaacacaaaccaagtgtctttctctcaactccatggtcttcccactccatcaggctgccgttgtgtctctagcacctagcatagtgcttaggacacaggttctggctaaatgaatgaactatcattgaatatacaaataattaagctcttagggaccagaagcttaagaatataagcatactgctactctcactccttttgcattttgctttcaggctgattgatgtacctccatggcaaccttcttgactttgctaattagttcttttgccttaatggtaatcataatatacaagaacaactttaatcctaaattcattaaattagatcagtggctattatgtagccacgatattcagaaaatgtagtgctaaggtctctggaatttgcaaaaagtcttccctttgagtttattttagtgccagattatagtagtattcttttgtgctacttgatttttgcataatttgtcagtttggctatttttaggttggtcatctttgatattgtattgttaagaaagtcaggttagataagccattcatatcatgattgtacctgagtctgtttttgacacatacattgatctattggacaccccaaaagtttggaatcaataacttcattccaaaactgagctttatcttttaagttccactttacctttctctctttctctttcttgcttagaattaccttttcattacccatgtaacgtgaatttattctccttgtgaacatttctgtgaatacatatttatgtgcgatacatgaaaaaaaggcctgaaaagatatattccaaacttttacaatggctacctctagggatagaaagggaaaggggaaggagggagtctgctggtcaaagaaaatgctaggcttatctgtattgttttaatattttataaggagagcatagcctcctcctttctgtgttccctctgttcatttgtcattcttagtgcaaacatatgagaatgtgtttatgtgcccatgtatataaggtaaatgcagccaaaacctcctcctaggagggtcccccagtgtcctaaggagttattcaccccttcttaatttttctgtcttaagtaggagaaaaggggtatcattattcttgcctgtgcctttttcctctgcaatgtacatttttctattagcttgtgctgctgcagtttatggcagttttattgctccgattatttgcccagtaaacaccagcttggtcacgaagaagcagagaaaattgaagaggtacttctaaagacacatcctgttaccaatagcaagttgcctccttgattagtgattcaagctaaggccacctgtggcgtgatctaagccttcgctccccagtggacactgtctgctgcaatgagattagtcactgaagggcccacattgttggccaggtcaatgcaatgtggtggaaaacgcaagggctttggggtttcaatcttggtacaaattctagttttatctcttaccagtcaaagggctcacaggcaagttccagtttctttcaagtctcaggttcctcctcctcccccttgtttctcctcctcttcctcatttttcttttagaattaaatgaaatgacatatggaagatatgaaagaacttagttccgttatagctaaggcacacaagaggtgttttatgattgactgccacttttctttctttctgctaagagagaaaaaaataattctttctccttcttctggcaggaatatgccctctatttctctttcttaaaactatggagagcagtccttacccacgctcatctcccctggcattgttgatgacatttccaggtaagatctcttaggctgaacaaataattgatgctgggaaaaaaaaaaaaaaaacatatcaagtgttattaggattgaggcttgaagttttcatagactcaggcactgttcctcaagcagttcctgaaaaagcttttaagatgaaagatttctaatatctgtaggaagagtaaaacctggaccccttaaggaacaataaccctaggccatgccaaatgcttcctttctttagatgaggactctcatgaagaaatagcagctggcaagagatgtcaccggcatttcttatttccatatgataagcttgatgtaaaggtgcctaactagtttcaaaaagaaaaaaaactaaacaaaaattcttaagcatttcttcagaaagtgttagagaagacagaaaatagagagtcagactagcacctcaggaagcacccaatgtactaaggccaaggcactcctcattgttggtattaggttggtgcaaaagtaattgtggcttttgccattattttgcaccaacctaataaaagaagcctggactagagaggctcccccataggatcagggatgaggtttcatctgagtgagtagaaccccaccaattaggtacatgtagtcagtcattcacaagcctctttccctggccaaggagactgtgttttctattagtaagaaagtcaggagacccaagaaaccctcctggaactcacttgattttgctgggaactgttaggttcttccaaaaatgactttgatatcattaaagttctttgaagacttttaattctgtaattctgacttagaaaggtggagtcacacctaccttacctacaagctccaaaaagactacctggctttggtcttcagactctgattcctttgcctcccctcgtggaaaaagctcagggagcctcactggagaggctttatcaaaatggagttgtctgggtgaattccagaatggaaacaacctaactgctacttccaagcactcttggaggttaagaaaaagagaggttagctgtaaaatgaattgcttttctagaatttctagcaaacaaaagttcttcctcaagatattacagtggggtgttctgtagagtttccgatttgcagaatggggctctggaggaaggtttaaattcaagggttcttctttatccccactgcggctgcgatctgggcagaggtacacaggatgcctgaccagtggctggcacttaggagtctcatgcctgaagcagacactctggtctctctgagatacaggacgcagacaggctgaacgtgagacagtgagctgggagtcacatctctaatctggtgtttatctggtgggagtagggagtcagaggtcaatcacagaattgctgttgcagactgttagagtggaaagaggccttagaaatattgtccgtgcctgtgcttttaaaggaaacaggctcagagagatcaaatggctttccaaatgcctcctctactagcacgtccctcaggagtctcattcctctcaatgttctcagctgtcagcatgcttcctgacacgtgataggtgctcaacaaatgtggaatgaatgagtacacattgtgctgctgactcaataacggagctgaaatgagtaccaagactctcttttctaccccgatctctcaagtcaacactcagtattactttctctgcacagtcaagcattggcacttggagctaaactaaggctcaccaaaggcggcctcctgcctgcactcaatctggacagatttgccactcactgctatgttggccttgtggattgaaggatctgcagcttccagtaccagcagaggatgtccgttgtcttagagaacagattggagccaatctcccctttggaagctaggacttacagaaccaacgacactgtttcgccacagctgccctgggatgaacgtggaatgatggcatggagacagagaggtcaagagccaccagtagctcctggccattgcttttcctgacaagttctgtgatggggagaacatgcgacctccccgagcatgtaatcacaaagtggagagggcaagctatgtcgagcaaaagtaaggtctggctagcattctctttctccagactttttaaataacaggctgcagggctagcatttctcctccgtgtggttattatctgtttctttttgcaaagcaagacattccatgaagggtgctgggactgcaaagcgggtcgtaaagggtgacaaagcagaaagagagttgcctgcagtctcctctgcatacgatccactctgcctgcttattcatccgcacagaggagtcgcgggccccactcttaaatggcttcattcatgatgattgacttcggagatatgcccatgccgtttgcagaatgttaagcaggaaaggatttttccctcctttgaaccagctgtgttaggaggctccagtttcacaaactcagggtgggggaggctggaaggaaaaatcagtcctcaaccagaatgcgttcctcaaatgtgaataaccgctgaataaagatggtaatgaactttgaagaggctcctcagcatgaaactgatgcctcaaggtgctcaggtattctccgaccaattctaagtagcatttaaaaccttcaaatatctgtaaaagtttgttctatttcagatagcttcacttctgtctactgactagctttagtccctacataacaggagttggagaagatctgaacctaattgttcattaaaaatcaaaagttggatttgtatgatgcattggagcttgcagttgtggtccctaccttttttttttttttttttttttaagacagggtctcactttgtcacccaggctggagtgcagtggcaccatcccaactcacagcagcctcaacctcccaaattcaagcgatcctcctgcctcagcctcctgagtagctgggactacaggtgggccatcttgcccagctaatttttgtattttcagtataggcagggttttgccatgttgcccaggctggtctcaaactccttagctcaagtgatttgcctaccttggcctcccaaagcgctaggtttgcaggcatgggccacctcacccagccagtccctgcatttctagagaaactgtcagcatgcattttggttcaaactttctcctctcaaagtttgattcctgcagtagcttcccaaggtgtctccattcttcacagtcctctcacccctaaatattctaatgccaaaatatttttcctatggactattttgtttatataactttcccgatgataaaccttataagcttctcattcattcccttatgaaaaccaaacttcttcatagagcagttaaggtccttacaaatgaccattctcattttgtatcatactcatcctctacccctgatctccattccagccaggcaggttcataccacatttttagccaatcttcaggcctccccaattctgtaacctttctatatgcttgttcctccacccagaaggacctcacctcccatctctgtttaacacattccaagtcatgctgcaaggtcatgaaggctttactggtaactcttgtttgggaactccttgtattataagcacatggggaaatgaccatcttggccagttgcggtggctcatgcctgtaatcccagcgctttgggaagccgaggtgggtggtcacttgaggtcaggagttcgagaccagactggccaacatggtgaaaccctgtctctactaaaaatacaaaaattagccgggcatggtggcatgtacctgtaatcccagctactcgggaggctgagtcaggagaatcacttgaacacgggaggcggaggttgcagtaagctgagtttgcactactgcacccaagcctgggcaacagagtgagacactgtctcacaataaaataaagtaaaataaaaaataaaataaaataccttgtcttccgcacaagaatataggattattgagagcacagactatgtattttttatatttctaccataccctctcacttataaagcccactgctttgcatattatgcacactttaaaaataatttttcaatgatgaatgaatatataagtgaatgagtgatcaacaaattaatgtattaattctggatgtacattttcttagcctttatctctattttcctataccacccaatgcaaagatactcacctcttagtagcataatttaaaaagaaagactaaaatatctactattcagccataagaaaaatgaaatcaagtcttttgtggcaagatggatggaactggaggccattatcctaagtgagataactcagaaacagaaagtcatataccacatgttgtcacttatacgtgggagctaaacagtgggtacacatagatacacagagtggaataatagacattggagaccccaaaaggtgggagggtaagaggggtaaggactgaaaaattacatcgtgggtacagtcttaatatatgcatgtaagaaatctgcactggtaccccctacatctttaaaaatgttttaaaaataaatatataggagaaaaagaaagattatacatatccgttataaagtctgtgttttcctctggactccttaattgtaaaaacaagagagtagagagcataaaaacttggacctcggggctaggttttctagtcccaggatccccaaggagtgctggggagtaggggttggaaaacatcaggagttacaccagacagagcatgtaaaaggttgactgctttctggtctggctgaatatgttttaactgcagagttagccctcaaaggtcatggactgggaaatctagctcttgttggttttactcaaatcaaaatgttaaaggacgaatcgaatccaattagtaaaagcaaacttcttatgggctgtaagtaaagcataagggaagcaagccaggaagcatgaccttaaaggggtgccatgccccaggggtgtgaagcttagaggcctcttatgtcaattttcacaaatagaataataactgtattcgcagaaaataactatgataataaacatgtcctgtagcatacaatttacaagctcagccactagggtaaatgcgttcgggtctaaagcatgctgttatgctacaatacagtacttgggacagtcatattatacttagcagatgcaagaatagagcacagctattccactcctccttatgtacgtaaggtacaaaggatgggatagccctgaggaagtctctcttcctgatgtaatatctgggttttttatttcggtaggaaaccgtccacttggtgatcacaggatgtaggttagaagctattttatcagtaaaaataggcttgccttggaataaacatatcctttcactcactagccatgtgatctcgggcaagtcattttcctctccacgggtctctttatctggggaactaagtgattagaacagaggatctctgggtctcctttccacactagggctttctctgatggatgaaattctatgggtctatgaatctgtgttctttgtagcttctacagaactcattttacaatacaagtttggctctcaggatagctcaagaacagattcattcatgttgaggaaaggaaggagaaaatgtttcaaaagttgattagcaaagcaaagaaaggatactcacatttattgacctgcttgaatgtttaaaatgcttcaaatgctcacgcctgtaatcccagcactttgggagcctgaggcgggtggatcacaaggtcaggagatcaagaccaccctggctaacatggtgaaatcccgtttctactaaaactacaaaaaaattagccgggcatggtggcaggcacctgtagtcccagctacccgggaggctgaggtaggagaatggcgtgaacccagaaggcagagcttgcagtgagctgagatcccgccactgcactccagcctgggtgacagagcaagactccatctcaaaaaaaaaaaaaaaaaaaaaaaaaagcatcaaacatctataaaacaaaagttcactcattttttttttaatgagcaaatatttattgactacatgccatatatgaggcaggcattgagccagatgctggtgatacataagaagcttttgtctaatcccattttacagatggaaaagttgaagttcagagagcttggttaagtaatcagcacaacctcatgtagctattggttggggagtctggatttgaacccatatccctctgactactgtagtacctcatgttgcatcctgcgaagtgagtctacagagccaaaaggagtagtatctggggcccaagccttgatctaatatcctgggtattctttctacaagagccactaaaatgagatttttgtgcttcctgacactatccccaaagtctaatggtatctgaaaattctcgctttccttaatgatttttatggaaacatcttctgttaatcatactaaactcttagaaaattgcctttgacaacctcagaactagatccctgaagcctggcccttagatgccacatttgatatttctagaaacaagaaggggacttcatgatatctgaaatcatgagtgaggcacttgaagaaatagctaaaagatggttctcctgcaaattggagtttctttccctaatcttgttccccaaagcccctggcttcttgttgaatttgcatacaagtattcatagaccttgcagagactgggaagacccagagagatgtctctgtgcccatccaaccctccagccactcctgacatgtagccttcgggcctgtgtccttgtattcactcagggttctccagagaaacagaaccaggagggtatatatagacatatgaaagcatatctattatggaaattggctcacgtgattatagaggctgataagtcccacagtatgtcgcctgcaaactggagaagcaggaaaactggtggtttaatgtagtcggggtctgaaggccagagatccaggggagctgatggtgactcccagtgcaaggctgaaggcctgagaaatacagccggggtaggggtgggagttgctgctggtgtaagtctcagaacccaaaaggcctgaaaaccaaaagctctgatgtccaagggcaagaaaaggtggatattttagttcaagaagagagaaggagaatgtgatcttcctccacctttttgttttattcaggcagtcaacgattaggagatgcccgcccacattggtgagagcaggccttctttactcagtctactgattcaaatgctaatctcttatgaaacaccctcatagacatacccagaaataatatttataccagccatctgggtatcccttagcccagtcatgctggtgcataaaattaatcgtcatagcttttaactgggtagttctgattggggagcctgtgttttccaaacctaatggattgaagcagcactgtgtggtcctaaggtaactccttgctcacggtctccatcttatgctagaaggatagaaagagttcttaaggagagcataccaggctaggtgaccaaatagagcttcagcagaagacagtggattagagataaagaatgtgctttgggggtacagtagaaaactaatgagtttgaatgccaacccagcctactagctgtgtacctgggactctagcatcagtgtcttcctctattgaatgaggataataatacttcttttggaagatcgtgaagatagttgctaacacaaagcaaaaacctgttttgcaataaagagtacctgatgttatttttgctttatttattaatgtattatccctcatgaatcatgtaagatttcagaccatggcattctagatggtcacttatagtgagggaagaagaagcttaattgcaaactagagcctgtgactgtatttgatgtgtgtgtatacatgtgtgtggggtgtctgcatatctgtgcatgtgtgtgcacacatgtcctatgtatccatgcatgcatttgtatgctcctgggcctggagccacacctccacgtgacatcctctggaatgactagaagatttgataaacctcccttcttgtgcaggcttccttaaatatggcagtttgaggatcccaattatagactcttgtctcaaaacagcctggaagacataaagacaagtctcacaaacattgtctcattagttcagtaaaaccttgctaatttatcctaattgtggggaaggatcgtttgcatgcaggaactgtctgaaagggacctgctttgataaatagacaggacttacttgtaattagtggtgccactcacacacaaacaatcaatgtgctcaagtacttaaaaatagtttgttctcgtaagtgggttgcacattcccaatgtcatcttgaagccgctaatgcaaggaatgggctgggagcaaggggtcttttattttctttcttatttccaaataacacaaccatctgacagatggccaggggcctactatgacctactcgcagggagagaaagaaacaatgaaggcaaagcagagggttttggcaagaatggggactcaaaagaccaaagtcctaatcccagttcagtctccaggctgtcaggttacattcaatttctgggtccgttttgcctgtaaatgaaagagtttagctaagtggtcttctagcatttttaagtcacactatttcagaactgtaagagatcctagagatcatccaatttaactcctttcattaaaatgtgaagatagtaaggggttctttcaatatagtcacgtgccacataaaattttggtcaacagcagaccacctatcaaccattgtcccataagactataatgaagttaaaaacttcctatcaatcacctagtgccgttgtagccatcctaacctcataacacaatgcattgctcatgtgtatgtgatgatgctggtgtaaataaacctatttcactgccagttggataaaagtatagcacatacaattatgttcagtacatagtacttgataatgataataaacaggcctgggcacgatggctcacgcctgtaatcccagcactttgggaggtcgaggtgggtgggtcacctgaggtcaggagttcggcagagtggccaacatggcgaaaccccgtctcgactaaaatataaaaattaggctgggtgaggtgcctcaagcctgtaatcctagcactataggaggctgaggcaggtgggtcacctgaggtcaggagttcgagaccagcctggccaacatggtgaaaccctgtctctactaaatatataaaaaattagccgggcatggtggagggtgcctgtagtcccagctacttgggaggctgaggcaggagacttgcttgaacctgggaggtggaggttgcagtgagctgagattgcaccactgcactccagcctgggcaaaagagtgacgctctgtcttaaaaaaataaataaataaacaataaataagtaaaaatcagccagatgtggtggtgtgcacctgtagtcccagttacttgggaggctgaggcagtagaatcaattgaacctgggaggcggaggttgcagtgagtcaagatcgtgccactgcacttcagcctgggcaacagagtgaggctccatctcaaaaaaaaaaaagataacaagtatgtgtttactatactatacttttattattattttagagtgtgctctttctacttataaagaaaagagtttactgtaaaacatacgccatgttaccccaacagcagcctcatccatcttgtgtttaccatgtctcttgatggtgtcgttttctcttgtgcttgatttagtctcatgttgttttgttcatcatggtccctaagcacacaaaatccactgctgatgttgccagtaacaggccgcatcaagtgattgacctggaaacaaaattaaaagtgattaaggactacgaaggtggaaatcagtgatggttattgcttgcccgtcaagcatgtcacatgccaccatagctacgatcttgaagaacaagaacaaagtgatggaagctattaaaggatctacttcattgaaggcaaggagacaaacaaaaattctagaagggtctatagcagttatggagaaactcctcacaacttggattaaagaccagatacagaagtgtatccctctcagcaccatggcaaccatggccaaagcaaaaagcttgtttgcaatgttgaaaaaacaaggctggacctgactgtgatgttgaatttactgctagctctagatggtttaaattattcaagaatcattattcatcacataatatgaaagtgagtggtgagtctgcatgtgtgagtggtgactctgcatatgctgatgtgaaggcagctgaaaaaaattttcaaactagataagctgattgtggggaaaaattatttgccagagaaaatcttcaatatggttgaaacctccctattctggaaatggatgcctgaaaggacttccatccataaggtgactaagtcaatgtcaggtttcaaggtttttaaggacaggacaacagttttgcttggaagcaatggtgcagactagagctggaaacccttcatgatctggcacagtgaaaaccccagggctttcaggcatatctataagcatgcagcgccactgtactacaggagcaattagaagtcatggatgacccagctcctcctccaagatgccttcctgaattgctgtctcagtgaaatggagaagtgctatttggagagtaacatacctttcaagattttgttcactattgataatgctcccacacatcctccttttactggtgattttcatcccaagatcaaagtggtgtctctcccttcaaatagcacctttttggtccaaccaatggatcaaagagttatagcagctcttcaggcctactacctggacataacatttgtatctactacctggacaggctattgctgaagctgaggaagacactgagatgacactgatgcaattctggaaggattacaacatctaagactgcatcaagaaacttgcttgcgcttgggctggtgtcaccaaagagtgtatgagtgacatctcaaagacactcaagaggctcatccatgacttcaaaggatttgccaaggatgaggaggttgcaaaaatcaacaaggctgtaagctgagatggcaaataagtttaacgtgggtgtggatgagaatgacattgaggagctcctagaggtggttcctgaggaattgactaatgagttgttggaactggaagaggaatgcaaaactgaagaagaggcaagagaaaaggaaactgcatgagaaggaaaagaagaactcccaagaaaattcatagtgaagggtttagcagaagcttttccagacctcaacaaggtcctcaaaaagtttgaagacatctcccagctacttgggagactgaggcaggaggatcacttgaggctaggagttagaggccagcctgagcaacatagcaagacccccatctctttttttcttaaaaaagaaaaaggtttgaaaacatggattccaataccaaaaggttttttttttttaatagagaggaatgttcatcgtgcattatctgcttacaagcaactctgtgatgaagagaggaaacaaagcaagaaatccaccctgaacatatttctgaaaagagtgacagctcctctagaacagcctcaggcagggccctcaggagatatccagaagaaggcattgttatcacagatgacagctccattcatgttattgcccctgaagaccttccagtgggacaagatgtggaggtggaaaactgtgatactgatgatcctgaccatgtgtaggcctaggctaatgtgcatgttcgtgtcttagtttttaacaaaaaagtttaaaaagtaatacaaaaataattaaaatttatgaaaaatagaaaaaggcatacagaataaggatataaagaagaaaatatttctgtatacctgagcaacgtatttatgttttaagctaagtgttactacaagaatcaaaaagtcaaaaaattaaaagtttataaagtaacaaagttacagtaagctaaggctaatctattattgaagaaaaatattttttattaattcagtgtagcctaagtgtccagtgttgctaaagtctacaggagtgtacagtgatgtcctaggccttcaccctcactcaccactcctcactgactcaccaacttccactcctccaaggttcattcatggcaagtgccttacataggtgtaccattttaaatcttttatgctatatttttaccatactttttctatgtttagatgtgtttagatacacaaataccgtgtgttacctttgcctacagtattcagtacagtaacatgctgtagatgtttgccacctaggagcaataggccatactatatagcctaggtgtgtagtagaaagtttattttgccaaggttgaggacgtgcccgtgacacagcctcaggaagtcctgatgacatatgcccaaggtggtcagggcacagctccattttacacatttagggagacatgacacatcaatcaatatacgtaaaaagtacataggttcagtctagaaaggcgggacaacttgaagcaaaggcagaaggtgggcaggagcttccaggtcacaattaggtgatacacaaagggttatattcttttgagtttctgattagcctttccaaaggaggcaaatcacatatgcatctatctcagtgagcagaggagtgactttgaatagaatgggaggcagggttgccctaagcagcttccagcttgagctttccttagtgatttgggggtcctcctttcacaccgtctaggtttgtgtaagtacactctatgaggttcccatgacgacaaaatcacctaaagatgcagctcttggatgtatccttgttgttaagcaatgcgtgactgaaccttctaagggttcataggctataaattatgaaggttgaacatatgtttaatgatgtatatgattaagataaaggctcaagaaagagtgaaactggaagtacttgacccagttcaaggtccaagcagagaaaagatgaacagccaacagggcacacagagtgcaggcaatcagagaagacagaaatgggtaatggggtagagaaatgaacccttgaaccctgagctcaaggagcagaataagtctggggtcaccaagggagcaagaaggcaggtgggaagcccactaggaatcaaggacacagataagagtcttagtaaagaaaggcaaaactcagcaaaaatactgcaccacggtcccaggtcatagaggaagaggatgaggcttgacgggagccactggctcagccagtggtgatcattataaggctggaggtccaatggcatcttctctgattaaaggagattaaggaagctctgggcttgtgaattgtgtcctcccctctggaggaaagtagaataatggatagagggatgggctgatggattgaagggggctccgtgtaatttttggcatccaggcagaaatggttccgagtggcaggaaacagtgccaatggtcccgtgagcctgaccagagcaggagctgaagatttgagagtcctccccacagaaagcagcactgagactgtgagaatgaacaagctctctgcagagacagtagaaggagaaaaaggaaggtcaaagatgatcttagagaacactctcttctcgctgggtaaatacactaaaaggtgacctattctcttcccttactagaggctaatagtgaagcatatattgaggacaggtgggaaacaagacgagtggcattttagaggtgacaagaataaatatggctcactccttgggttgcacgttatcagattcgcccatctgtgtctctccttcgcttacattactattcactgatgagatggcatctccattgtctccaggatgcaaagtacaacaaaacaagtccctggtgttctttgccttcagagataggtgtggattgagatatgaaagccacggaaataaatcagcccctagaaacaaatgcttgtatgttcctttctccctgggaaattgcattccaaggaaaaatcagcaagttctgttcttttcttgatctggttttctacctgagcattctcaagcctggtgaccttgaggctgtcagctggggcagcaatctcagaaaggtctgcccgcctccagaatgcctcccttctcagcctgaaactcatagaactaaaaattctcatctgcccattccccacttttctaaaaatgtaaagaataagtccagagagaaaaaatagtttgatcaagatcatcagcgcatatcatggattagatagtatttctcaaatcagagtactacataagcctcttttaaaagagaaataaaaatattttataagtccctataatatatgcatatacctcgattgaacactgacttcaggttaacaattcgcagattggttcagggtgactgagctgtgtcatgtgctccctgcccactggctcctatcctgagctccatcgggcttgttacccctcatggtccactccatcctgagctcctggcaggccttataaaaagggctttccagccgggcatggtggctcacacctgtaatcccagcactttgtggggaggccgaggcaggcggatcatgaggtcaggagatcgagaccatcctggctaacacagtggaaccctgtctctactaaaaatacaaaaaaaaaaaaatagccaggtgtggtggcacgtacctgtagtcccaggtactcgagaggctgaggcaggagaatcgcttgaacccgggaggcagagtttgcagtgagccaagatggcaccactgcacttcagcctgggtgacagagcgagactccatctcaaaaaaaaaaaaagaaaaagaactttccctgagtacctttgcctataagaatcttcccaggcccacctgtagcctactcactctttctcctttgatcatggtgggatatctttctctgcctctagttatacagtctctgggacttcttggtttccaaagctactctcctagtaattggtctttatttggcttaattccttttttcagctccacactcacccagagatgaggtagaaaaaggtggaggagtctaccaggtgatgcgatgagcagctaggccatcatgacatgacacatcggtgaaatgttaggggtccataggaagagggcatagccctgggaagctctgaatggaaggtagggtagaaaaggctgcaggggtcaaagggtgtgtagggaattgatccacagcatgtgagaactgaatggaccaaggaaagccctagacctactcccttactttgcatataaagacagtcccagagatccaaagagccttgcttggttcctcgtgggttaggagaccataaaaggtaacagttaagagcagtggttttgaagttggacaggcctgggccctgaattcaaactcagcctctattacgagctgtgtgatcttgagcaagtcatctgactttcctgaatttctgtttcttcatcataataaacctacttcatatggtaggggcgaatgttaaatgagataatggcttagaagtgcttaacacaatgtctgccacttaataagagttcaataaatgttaactgtgaataatgacaaaggtggaattagaaagtcaggtcttctggatccttcatctggatgttgtatatctcacccaaaggagacaaatttgattcataggtttatttatggttgaacctggcagaaaacatgctcttctaagaagataaagagctgcttcagatcagaaagttgaatcgtaggcagttagacacgtttgctggagagttgaaggacaggtctaccggtccaggactgaggatgaaccacaagtgatgcagcacgcggacttcatgcacaaaataagatgtgctgctaatcaggacagctgatacatggacaaaaccagaatgtgcagaagaagaaaaagaacagactgtgccaggatgggaagcaggatcattatacaggccagatctttcatgaaaattctgttgtaacttttttttttttttttgagatggagtctcactctggctcccaggctggagtgcagtggcgcgatctcagctcactgcaacctccacctcccgggttcaagccattctcctgcctcagcctccgaagtagcgggattacaggagtgcaccaccatgcccagctgatttttgtattttcagtagagatgaggtttcaccatgttggccaggatggtctcgatctcctgatctcatgattggcccacctcggcctcccaaagtgctggaattacaggcgtgatccaccgcacctggccttgttttaactttctaatacagaaaatccatgaattgggtaccctcccagctccatgcaggctctgcaaaggaacacaggtacaatcagcaatcggtcagcttctattcatttctatgaggcctctcagaatgaggcttctgagcctaagaggaacctgtttactgaaggcaaacttggagacaggctgggaatatctcagctcatagcctcgtagattctcattccacctcaaatcctaacaagtccttatacaaaagggttcctggaggaagaaatggaaacaggaggtgagggagggatttgggagatcagagttcctagggaggactagagatgatccagggaggctgatttggtggaatgatgcattccttcagcctttgctatagaggccgccccagacttccctacattccatcctgggggaacaataggtgttgacttgtcccaaggtcgtgctcatcagtaatagggatggagaaatgtcactctgggccttgtcggctctgcaattattcaaatgctttgcttataatacaatcacagctcctagctctgattattggcatcatcaacatcatctattaatggcctttgagctcctctgggtacatggcattgtacaagatgctaaaagatgccaaacacagactcagaaaccgaaagaggaaaaagagcaggaagtggaccaacccaggcatcattctgagtagaaagatctaaaccagccgaaatccattcatgtgagctaatcttaaagggccaggacctgctaagtaccagaagggcattaattattccagggtcttctatcatttctatcttcattatttcagctgcctatttttaactagaagtatttaaatttccattagttttccttttatcccttttgttaagtaaaccctctctttatcacctctctgcctctcccagtgtggtggctgtctgcagagtgaagaattagaaaaactctaacagttagaacaaaataaataggtaaaggagggctagcttccaaattggccagaccttgctgtgtttgcacagtggcaccttgatacctggcatttctctttgatggtgccgtaggaactcaacacaaagtggggagacacgctttgctgaaaatgccccgtcaccccagcatgaaacatgttccacccaccgcagagctccaaacagctgttctgcctcctttcatgcatgtgctttttagctgatggtgggagacagcatgccagaaacatctgagtttccaccaaaggcatattgtaggttagaagacacagacagctgctgttgtattgaaaacctgctcatcagagtttcgaaaggaacagatatgaaaggttcaaatgaccccttcagtgtttctccatctaactagaccttaagctctgcctctcattaatctttaatgaacaacaaagaaaatgtgtagctggctaattattgtgtagggtggcagatgcttagcgaggaaaagtccccagagtcacgtcatttaaagagacattgtcaaaaagaatcttattttgaaatggcttccctgacctgtagcattatctattcttttaaacttgaactacttttctctcaacattttgatcattgtctccgtctagggcatttgagctttaaaagtcttgagcaatcaggtgatggaatcccatattcgtcccctacaagaaattctcagtcctcctccttggggctgggtgggaagacttgagtgctgcttttcctcgtggcatgatacctacctggaacatctttcttcagttttctctttccccagttaattcattcatcctgtcccatgctgcactgggctctcactttctttgatttttctcagcatttagacagttttagtatgaaaactcttgaacacaagttcctccagggcagagactgtctcatcatctctgtccagtacttactacaatgcctggcgcacactatactcaataaatgtttgttgaattcaatgaaattgcttataggtgccttgggcttatttgctttttatttcatactactctgcagttttcaccactaaagattccttgaaggtagaattcttgtcttattctttttttgccctacctctagaacagttgctacacattgatgtaacaggttctccacatgctggatggccttgttaattgttgtttaaagtcatcttgtatatcaactctgcatgcactgtaaggtgttctgtttgagtaaatatttatatgttatttatttaagaggaaactaggcaagtttgattagagctctttttttttttttttttttgagacggagtcttgctccgtgggtcacgcaggctggagttcagtggcatgatctgggctcactgcaacctccgcctcctgggttcaagtgattctcccacctccaccttccgagtagctgggatttcagccatgtgccaccatgcctggctaatttttgtatttttagtagagatggggtttcaccatgttggccaggctggtctcaaactcttaacctcagacgatccacccacctcagcctcccaaagtgctgggattacaggcgtgagctaacatgcccggcctacaactccttttatagacaattttatttttagattgaaatgcaaggatgtcagtgctgtatttttaagattgtgtttacttcaggagtcaataaaaaaattttttttttgagacagggtctctctctgttgctcaagttggggtgcagtggcacgatcattgctcactgcagcctcaacttccctggctcaaatgatcctcctacctcagcctccccagtagctggtattacaagcatacactatcatgcctggctaattttctttccttttcttttcttcctttttttttttttttttttttttttttttgtagagacctgtctcactgttgcctggggtggtctcaaactcctgggttcaaatgatcctcctgactcagcctcccaaagtgctgggattataggtgtgaacaagcatgccagcgcccccaccctcccaccaattgttttaatttaaaaagattaaccgcagtaacattctaaacagttgttgaagaagtgattttggaacctttggaggagaatatggtaattccaagtgtcaacacaggctcacttagaataaaaagaccctcttcaggagcgtcatgagcttagtagggtagaggaatggaacagacacagaataacttgatttaggcaacccactggacaatgctttcctgatattctggtaggtgagtctgtggcaaattgaacacttttatccaaagaggcatagtgagtaagtcttgcccatctggaaggcatctcagataaaagtgccaaaggattccgctttggcctttggcttttctgtgtttttgatgcgtgactgagagggtggcagaaacagaatttaacatttgttcagcacttaccaccttctaggtacggtgctagaagctgtgtggttatcatctcattttatgagtggcctggtctgctgatgattcaaagctcaggagcaaagccaacttcacagatgacagactaaattctggcaaccaagtagttaaaatttgctgcagaaagcaccatgcccccacactcaggttcaaaacaaccagctgctttgagccacaacctacagaatctaggagatctggttcggtaatcatttgtgggaaaagaattgggggtaacaaagagggggtagggaggaggagggatttgtggtgatcacatgtgaacagaaagcgatggtgtgctggagctgcttggcgagagaaccctccaagaggctacagatgcatagcccagacctcagggagaactggccctaggattccctgcacctgccagaccagtacaaggtaccaccattgtcctagacttctgtagctgaacaaagcttcaagagtcatctagctgtattttggtcatcagatttgaagggaacagacttaaatccagaagagaatgaccatatcaaaatgggcactagaaaccaaaaaatagaaacctattatacggtgtatcttcaaagcactcttctattcattctaccatttaatccttcaacagtcctgtgaaagggttaataaaataaagaaaccacaaggaaagaagtggagtgactcgcccacagccagccagtgaagagtctggctcttgagttgggatctccagaccatcactcgggtattcttcctctggaccatgctgtgtctctatgcacaagcatctgctcacgctgggccagacgccgagtaggcacaggcctgtggggaagttgttctgcaaggctcacaggaggccagaggttcccacagcccataaactcccagcccttagccagcccctggccccccacacaatctgacccagagcagctgtgtaacaggcacgggctgtttgtgcctctggctttcagcagagtttgggctggagttcacctgggaatggctctgccaggctttcactcaacacccgctgccaaagtctgccttcccttcctccactgatctcttgtgaagggagggatgtaaaacacagcccaactctaacctgcggttcccaccagcccggccctcagagctgccccggctcccagaaacaataccctgattatcattcattatttctacttcttagtattaaaatccttttaatatggcattgaagaccactggggagttttaaatttcgtgtcagaccaggatttataggccagttctgaaattttacctctgggctcaataattgcaattcccttttaatcgctctcttagacacctctgttaaaagacttcaattatttccacactgtggcccatgagacggccaatttgaatacccaacccatgtcacctccttattatggaggcctgcgtgggaggcgctagacaggaacttggtctgaaggtactaggtctgatgtgctgtcccaaagggccttgggatttttgggaaaggagtctcctctctccaggagtcgtgagttcagggatcataccccacccacctctgttcttccactccccaactggaagcaagtaccagatgtgttaggatgtatatgctcactgaggcttgttttgaaagctgtacaattctatgaacaggcaaatgcatatactgggaatccttccatgggaaattgcttaaaggaatatgatacagggggttggctgggagggtcaaggcagttagagatctttcagctgagctctggagagtcctgtggtgcttttgggaaagtaacagcagacactacctgagggggttgtggagtattcgaaagagactctcaccaccacctccaccaaggacagaaagaggacacaggatcagccacagcctgcaaacagcggccacgtcaggagaggagagaagagcagcttgctcctcgaaggcccaacttgatcaggtgtagtgaagggggctgagacaggagctgagggtgggagtagctaaaggagccacctccaggatgccatttagtgctttgtatctgatgacagcaatttgtaaggggtaaatgcataactctgtaaccagagccactaagtgctgaaagaaggtttaattgtgggccaaaaacatctgctttttttttttttgagacagagtctcactctgtttgcccaggctggagtgcaatggtgcgacttcggctcaccgcaacctctgcctcccaggtttaagtgattctcctgcctcagcctcccaagtagctggggctacaggcatgtgccaccatgcctggctaatctttgtatttttagtagagacagggtttctccatgttggtcaggctggtctcgaactcccaacctcagatgatctgccgatctcagcatcccaaggtacccggaccacaggcgtgagccaccacacccagccaacatctgcttttattgggagatagtggactgaatgagaggcagcactcaggctgggaaaaggggacttcataaaagaggcaagggcaacaaagaaaatctaggattcagggtctcgcacattgtgatcaaagtcttgttcttgggtggcagcagacaagagggaatgagactccccagccttggtaaggaggggtcccctgggacctcggtcagcagccttgcatggtaacataagggatgtctgcactggaggccattaatgggttggaccaaagcgagaagggtcactcaagagcatggatctcccaatacagcaatgggctaagctattgtgtcccaaaacagagtgctgtcaccccaggatattcaaaatgattacctgcggtactattaacatggcttcttatatttatcactaattttaaaataagatattgaattttactaatacttaatatcagactgacaggagtatatgcgcatgctcaaaagatttttataatacatgaaaatgaacgaaaaaaaatcttttaaatgagatgatgtacctgacaccagaagactcagtggcatatgatttaactcaacatggggctccagcccctggcctgtcaccgagcccatgcccacaaacatacacggagccaagtcatcatggatgaggcctcaaggtcccagttatcctaactcagttggtaagatgccatgaggatcagcaccagactcttgctctaggatcctagtgtctgtgtcttttcctatcgaaaaaatgggcttttatttccttctgctttccatgcctgttttctcatctgtaaaatgggaagagtcttgcattatcccagtaccacaagaaccaatgttcattttcacccatgtgaaaatgcaaggaagaaggagactcccaggtccggtttgtcccaggctcctccacacatataagcccctctcatgcccctaccaaaggaagacctcataaacggaagagacatcaccggtcaggctccacaggcacacacagcaggcagacaccatggtggccaagccccatgctctgaggcacttcccacttgcaggagtcttcaaggggtggataagggagtgccagcctagaaatcccaatcccaagcccaagctcaggcacacactagctaatcttctgagcatgccctgtagctcttcattccgcattgcctggctatgctacaaaggagacacgggcaccctcgtgccttttgcccagggtggctgtaagaatcagattagttgggcggtgggggttgtatgtgtggaaacagggagccctcttagatggtaaagagtgtactgagctgagggtcccctggctgtcccaaggactcacccttgctgtggactcggaatttgacagatctaggttggaacctcatctctgttatttaccaaacctagaacaagataattcacttgctagaatctcagttttttaatctgtgcaatgggaacaacaattcctacctcttagagctcctaagagattaaatgagataactgtgaagaattcctgcccagcgtctgacacagagttagtgtccaaggatggcaggcgctaatgtaactattatctaatgtcagtgtaacaagcaccaccgtcaccacttggatgacatcattggcaggtttccaaagccagagactcttgcagaccacagtctcgaccattttcagatacccctgcagcagctcctgccacacaagcctcaccctgtagccatgaagagcctgagtgtccattaactgccttggagcagaggccaccagcgctttgaatcagaggctcagagctgttttgaatgctgtctctgaacctgctctgagctgtcagcagaactttgcaaccacccacagaattcacaggaggtgggagctcacatgccagattccatctttccagcctttgtcacggtctattccagagtcctctgacctcggagaatgctggaaactgggaaggaggaggggggtcctgctctcctgcccagctccataagaaacatgccgagcaactgaaaagatgccagcttctgtgacctatcacaaaaaggcctgggtgaagacatgggttttacagcctcatccccaggagccagtttttatggactctttggaggtttctgcttggtttgcttttaagaaaactgcattgccagctcaccagtggctatagtgacacttataaaacagtgggtgtccaggaagctctgtattaagacactttgcatacatctcttgggagacaggtaaaggaagtgggctattcctgttttggagatggccgagcccttatcaattaaatatatcactgaaggactgaaccagccaaaaactgggagcagcctgtcctttccagaaaattacagcttccagtgtattaggccagggaccatgtcaaatgatcctgagggtttggggctttcttactgtattgattcaaagtctgagagaaatgagaagatgggaggaaacgctggcctgtgcccagggattcctgccccctctagccctagcccccatctttctggctcctgcatgtgcccctgcctctcatgcaggctcagcatcccttaaaagttccaggtcacaattttgagctgaccctcgaaagtcatgaaaattggcagtggcagtcccagcccagaaattgactcccaagtgaacatatcgttggcacaatctcagggcctcaagcagttctgtttgttatgttcgggaaagctcccatatggctgatacagcagaggcctgaattctgaattccaaattccattagtttcctcaagcatggcttaaaggtgtgagcatgagcctgggcaaatctaatgggcccttgattcctgcattgttagcaaacacttcctagtatcattctacagaggggcctccctgaagggtatggtgatagtattcatctgggaggcagaggtaaacgtgtagaaaaatgttctgtacaatttctggccacaaggaaaatagggctgctttgcaagaaataagttgttttctcagctggtctgtccaccaggctggtcatcacatagaaaatgataccattcatccgaagtctgcaaaaatacttttaaagtttgtttctccagttagtggggatggttttgaatgatcgacctgtattagtttgcaaggactgccataacaaagtaccagaaactggtggcttaaataacagaacttcattgtctcacagttctggaggctagaagtccaagatcaaggtgtcagcagggttggttccttctgaggcctgtgaggaagaatctcttccatgccactgtgcttctagtggttttctggcaatctttggcattccttggtatacatcaccctaatccctgccttcatattcacacggcattctccctgtgtgtgtatctgtctctgtgtccaaattcccctctgttttataagaatatagtcatattggatgggtgcccaccctaatgatctaattttaacttgattacctttataaagatcctgttatcacataaagtcacattctgaggcatggggggttaagacttaaacatacctttttgagtgagtcacaattcaaacaatgatactgcctttcctgcccaccctactaggaccgaaggaagccagccaatagtggcacatgccaccttctccaaaaagcttttccaaaaacttctcagacagggtttggcactccttgcccttgtcccctataccagttgcctggtccaacctgggaggtgtattcctgaaaaacaccaagatgagccttgatcaatgaggagtagccaagtagcaaaaaaaaaaaaaaaaaaaaaaaaccatagtaacaaagggcctctgggtacagagaacatcatgagcaaaatgtggaggatgaaggagccctggtatgtgcagggagccagaggcaggtcccgaggccattggagaactgtggtcatgtttgagggttttttttgtttgtttttgtttttgtttttgagatggagtctcgctctgtcatctaggctggagtacagtagcacaatctcagctcactgtaactctcagcctcctgggttcaagcgattctcctgcctcagcctccagagtagctgggattacaggcacacgccaccatgtccagctgatttttgtatttttagtagagacagggtttcaccatgttggtcaggctggtctcgaactcctgacctcgtgatccgcccacctcggcctcctaaagtgctgggattacaggcatgagccactgcacccggccatgtttgagttttaaagagattattcctgacacggggtgtagaatggacccctcctcgggctgaaggtggatgtgtccttgggtctcagttcttctctgccatattagaggattagacacagtgatttccaaggctcagacccctcttaacatctatcaagcctgcaacagcgttattatccaggatacttgccaccatggagtataagcagcacgggagggcttgtgagccttttttgtaccaagagggctcagagcaccatccatcaaagcctctgacaattaccttcccattcctagtgtggaggtggaaaggtgtgatccctctcctcactcatcacaacaaccacagctgacacacctataacaaaaaacaggttaacgagagaaaaagcaaaacaaacgtatttagtcaaagttttccatgacatgggaggcttcagaaatgaaaacccaaagacccaggggaaattttctgtttttatgcttaggttcaatgaagaacagatagctgtgtagaaatatgattaggcaaaagggtatgagctaaggctaatagacagaagggggaccccaaaaaggcctggctgttggattcttcttggtctcttgtctagcactccttcctcactcctccctggtacagggcaggaccctctggaactagggtcttaagatctgctatccaacaaggtagttcagagaattctgttatggacagctctatacagaaaggcagggggaaggttagagcaacaattctcatttctatggcttgccttgggggagaaaggggagcaggggatagaaaggcaggagagggtcagagagaacttgcttctgaagaccctccaatgtccttcagtttaaagtccccatcatgctaaggtgccataccttggggtcatgttctgagttccaaccatgaccaccccagtgaaggggcagggcatagcaaggtgtgggtgggggaccctctctagcagatacaagtctgtgagctattcttaccccacctcaccaggctcctccaggcttttctggctgaccacttatcccagccccagaatttgcttacaggaccacagtttatggcaagtttcaccctactgtataaagtttcagcacagtggcttgacttggccagagatttatggctgaaatggagcctttgggcttgggtgtcagcattttgcttggctcagaggcttgcattcgcatttgaaccaatcaatacatgcaggcattaagtggtatttaggctgcctctctagggaacaggatgggctgctggaatcatttgagcatgggcagggaggatgcttctaggactgggaaatcccgggagctctgaagtgggggccctggatgaatgccccaactccagccctgctcaagactcaggcctcaagctggaggcagactggactgaaggagggatcccacagaaacggccacatttcagtttcaatgttgtctttatccttctccatggggatgatgtattgaagaaaaaaaaaaaacctactgcattgacttggcttgaaagaaaagattgtatttgaaaagaacagatggtgctaaaaagttattggaagaaagagagagttaggaaaccaaattccagattcccactggctgctggtgggtgatgtgcccacatctccttacagaaagagttagaaaggcaaaatgatcacctgggactctaatcacagaaaatctaccacccaccctgccagaaagattgtctggcaagtttgtggagtggaaaacccccactggaatcccctcctgtggtctcttctctaattctaagtgattcctggaatgccagcaccatccacactctctcccctctcacttcccctgcccagaattcagctgggtccctccccacagctccctggtgagggatgctcagcagatgctggaggaggaggtggcttgcatgggacctaatccaaaatttagagaaacagaaagaggaaattcaggattctcagggtcactactcttgattagaagtcttctcttgcttgatttttttctttctttctttcttttttttttttctggtctggataatcagtgttttttcctttaaaaagaagaaaaaaaccactgatgcatcttctatatattttttatacaaaccagagcaaagaagaatccctcttagacaatactactgggaccaattgttgtttgggaatcaacttagatccttatatattttattttaatttgcaacttctaaatgcatgttaatccaccagtgcttgatgtagggccaaattagtgtggtgtggtctgttgattagagttcctcattgtctttctcataaattacattcataacacctcatccatgatgttcagtatccatttccttaaaatggaaataatttttaaatacttgtgaagtaatctgaaggctctctggagactttccgggtttttaagatttgtttcctgatctttctgttgccccattcacacctaattcaacagtaattatttgtggtgactcaccagctaccagtctttccaaagtattcaaatgttctcctgcctatttcatccacttaatgagtacagctggcataaactgttttagaaactgtaggggcagaaagatgtgtcacttttccttacccatcacaagggtcactctggacactcctaggacaaaagacaggaaagcaagaggaaagcaaaacaaatttgtttaattaaagttttacgttacttgggagccttcagaaatgaagacccaatgtctttgtttggtttgatgaagagtgagccattgcagaaggggatgggacagaaaggggatgatccagtggtgacggactgagggggaaacctagcaagcctgtgggttcagattctccttggcctccctgtctaacatttcttcctcctgggtgtggagcaggacccctatggaatgaaggtcttcaaggcagcagggagagaataaccattctagttttatggcttgctccaggggagaggggtgctagttcctatgactgattttggggaagaggacttctggtttctacaactcacttcaagggagaaagaggggcgagagacaggaggggaagagaaggtcagacagaacttgcttctgaggcccttccaaggtccttcaattcaaaggactcagcatgccaaggggccatacttttgggtatcatgttccgagtctgacagaataagcataactgactctcagtgggtgtggaactcaaatgatgggagtagggggtctaggggtactaaagaataaccttgagcactcagtaaccttgaacacttagtaaccttgggcattcagtgaccttgaacattcagtgaccttgaacactcagtgaccttgagcattcagtgaccttgaactttgagtgatcttaaacacagtaaccttaaatactcagtaaccttgaacattgaacctcagtaacattgaacattcactgacctttaacactcagtaaccttgaccagtcagcaaccttgaacattcagagggcacagggtatttcacggcatgtaaaatgtagagcttgtgctaatccagcaagcaaattagtcacacgaagtccagttaagaacatttctactactatgtttttcttacaactgtggttatgatcagtctactcctactcctccccatcccgattgcaatgatttagaggctaagtctgtagaggtagactcttcgtctcctaccttctggcctggtacacagaatgaagaaaaaatgctcagccagggccagggtggacatcagcccccaacaagcctgcatattccagtccagattctgaagatgcagaggtcgagtagaaaaggaataaggtagcctgaggcaacaatgaaaggggccaaaatatctacaggatgcaccctttgctagtatgctgttcttcaagcacaacccacctctgacccaccaaaagctcttctaaaaaatgagttacttgcatttggcatacatctaaacctatgtgcattatagtaggaagtgccagagttttgaagatagtcttgggttcacgttgcctcctagtacttactacatgaaccagctgtgtcagctctctaagcctcaaatttctctcttataaaatgaggatgatgatatgtttcatgcatttgttaggaaaattaaataagattttcatatttaatggaaggagtcctgaaacctttatgtctggaatgggaggctcttctccaaaacccccaaatcccaccacacagtcaatctcttatttcaccttcttataagatcatcagccacactggatttaggagagaaaagaaacactagcataataataacaacagcatccgctaatgcttattgagtgcaaactacatgcccacatatctcaacccatgtgatcttcacaatacccctttatgagtcaattagtattcccacttcttaattacaaaattcaggcacagagaggttaggttaggtagctggcctaaggtcacacagccaataaaaggcagaagtgagactataaaactctcagtaggtgtggaactcaagtgatgagagcaggaggtccaggggcctgaggtcacacagccaataaaagtctggctgcttaattattatatttctcttgaaagaaggaaaggaaaagtgagggaggaatagaagcaagaaagagaggagggagacagggagggagggaacaagggaggagagaaaaaaaggggaagttagaagaagctcaaaagaagctaggaggccggtgcggtggctcatggctgtaaccccaaaggaggcactttgggaggccaaggtgggcggatcacctgaggtcaggagtttaagaccaacctggccaacacggggaaaccccatcttgactaaaaatacaaaaattagctgggcatgatggcgcacacctataatcccagctacttgggaggttgaggcatgagaatcgcttgagccaggaggcggacgttgcagtgagccaagatcgtgccactgcactccagcctgggtgacagagtgacactccacaccaccaccccccccccaaaaaaaagaggctaggaaaaggagctcaggaccatttatgttgtctttgttccgaaacatgagaaaataattaaggaaatgcagtttggaacatcttctatgcctctaccccaggaaggccagcctaccttccagatccccgtcacccacataacatctctgatgaaatgaaaactgctttacagctgacaatgctaaggtctcaacaagcaggcctgcagccccagggaacccagccctgccttggccccccctacagagcctggagcccccttagcctcagagcagctcttctccacgctgggccattggaagccagatcccctttcgacctgaaacctcttcctttcacagctgatcctcttcagagcacattcatctaacttgtgggaaagtatgaagggcaagtgaataataaagccaaggctacttggataaaagactccatgccacacgccatgtgtaattattattacagaaaattaataagcaacaaaggacctcacactaaaatttacattgatctagcatttttcccctgctatctcccataaaaatgctttaaatgcaggctgatttaatggaaacagtaaaaaattgtgctgaatggtttatatttgctacagaattactacaaagtatattttaaggaaaatttgaaagttgtgtgttttttttccctgtaggataagattagagagagaggttcaaatgttttttttttttctctttctttctgtattgatccagacaaactcccacaggctcagttctttgtttctaacaaatctttacaccttcacacctcgtccagacacttgtcaagagagattcttagcaaagacacatgtggaggaatgccagcagtgtggcttgagtcctgacagtgttatgcttgataataatcatcaccacgtgactgtgttctatgtgacagggacttggctggttatctagtttatgtggcttttgtcattgtcgatctcacccgtgagtttgggcatcccagctaggagctcagtcaccatccgaatgacttggcgctcatgaccagcacaggacatgaggatagccacatcttgtagcttcaggtccccagccatgttcatcagagccagaaataggaataaagcctcggaaaaacagtttctaacctcagggagcttaaatggcagaataaaatggtgttctaaagattatagaggcatgccaacctgcattttaaactcagttataagcagcgcatatagtagacctttaataagttttaactcttgttggtcatattattaatgctgctgtaggtagtattcatattgacttggtccaagcctgacctgcattggagagaacatttatgcaacagatggtaactgtcatagttgagaactcaggtatcctccaggtctcaattacataattctccggttccttctgattcgctcttggcaaatggaggccaagagttatgtgatgagctatgtagtaataatgcaaccgccaaagttccccagtctttgcatttctcctaacagggaaggcgtcattatcatgtgaatagatgacagctagtgttcatgaattgacacgaacgtttggattaactcagctccactgcaatataaattttgaccaagagtgtcagaaactcgtctgatttaacagaaatatgttcatttgtcctctcagtcaacaaatattttttgagtgtctacgatgtataaggcattggagacatgtgatgaatgatccaccattctggcattaaggaggtgggaaggcaagacacagaagtcatccttcctgtagaggccaatgaaaaacattggcacctgcaagattggaccacctgttctccaaacacacactgtctatgtggcctctgctcatgtgctcatgccagtctctctttctgcatttctgcattgcccttttcctaattcctgacccctcttcacaacccgtcctcaagatactcctatcctgaccatccatttggagacatcactttggcctcggctttaatagcatatggtgcctacacctctcactcacctctcgtatgctaccattcactaaaaatcttggtacctatgtttattctttctcaccagtctgtaagctccttgagaacaaggctacatcctaaacacttcgcatccctagagcatccaatactttagctagtgtgcaacaatgcaccagtaaatatctgagaaatggaatgcgactcaacaaatgctaaccaagaactagacaccaagcatcttttcatgtcctacaggaagatgcaaaggtaaagaagaagcttttactctaagtgagatggaggcctttggaggattctgagaggagtggtgatctgctatcatagtcaaatcctaatacatcttgtagggatgttctaacataatttcttggggttgtatttaacgtataaagatgcatttaaccaagtttttctttatttaaacaaacgtgatggctgctactcataaattgcaatacctttctcaccctcttttactatattcctttctcctttgacgctcataaatgaattgagatgcagatatttgcaaggaccagtgtcattccatgaagaaagcagtggtttccataggaatagctccgcttatggagctcctaccgtgtgctaagaattattactctgcatgcatccttctcaaaaatccttacaacaatccagcaagttaggcattatgacctccatcttaaaaatagggaaactggagctcagaggaattaaatcatttgcctaaggtcgtagcttagggtggtggatggtggagctgagagctgaatctaggccttgccttgctacactgcagcagctaaaaccatctcagaaaggcattcctttgaaaagtatgtagggtgggtttgagggcacacttaaggaagccagccctatgtcaacatgatgcccactgggatattgcacagaagcaaagtatgatgttccctgtcttgtcaactgccactcatggtcctcacgtgttgtcataaagtgtcccttcattctgggcttaaaataacttggtgcctttgccctcctgagtcacagctgccaacctttcaaactcatcagcggcttgccttgtatcagatgtgccagacagttttctttaaacatatagagctaagctggtagggagctgtgggaggcttagaaattctttttgtttccatgtcagagcttcttgtgatttttttgtagatttttctgacaaagtatttcactatctggccagtgtgtctatcctgataacccaaattgatgatgcctccagcaatgctaagtagacatattcttctctgtctctgagattttagggaaatgaaatgcaattgactgtatagactgatccataggttgcattgcctcttgtgcttgcagtcttggagcaataatatgctttattttaatcctaagtctgcaggtaactcaatgtgtgaccttgagcaagacttcacttctccaaggagggtgaaactgagtctttttgcagaaataaatctgcgattctgtgattaatcattctcctcccacctctgtgggatattatttgtccattggagatttcagggctttcataaaatgttttgttactaggactcctgcaatcagctagggaagtatagatatcagatcaataagggcccttagggaacttttaattcaatgcctgcattttgctaatgaggaaactaaaacccaaagaggtgcagggacttgcccaagcccacgcaaatccacgaccggaatccaggactcagctcccaattcagtggcttttctacatatctcttctagcctgtaggtcagaaatggaccttgatattcacaagccaaccctcctgccttttttgatggactctaacatactcattataatataggcactctgcaaaaatggctggtccgtgtttttctcaaaaaattcatgcaaagttggaggcagaatacaattgatcagaaaacatccaacatttcaggcatttttggagagaagtgccttattcaaagtcatcaggcaaatgaggggcagagccagaactggaaccggagagctccagagagacacagggaagataatggattgtgacaagctgtccatacagtcccctgacttcctaaagtccagatggacaccccacactgtcacattgattgatggaagcaccagtgataagacagtcacaaatccccaacacatggaaccagctgtacgtttgtctccaggaggctctaggtcagaacataaccttcccttctgcaagcctaagtagaattgccaccagccgaagggacaaaagcaggaccctaataggctcattctgtgaccacttgggtgtaagcaaagaaaatggaggcagaccaagaagagagtttagatttgtttttcactgggtttttggcgttctcttaaacaaatctgaccctagatataagcttgcccttttctagtcccaacttccctggatataaaatacatgtttggcaactgctctgaaagttattaaagttgcagcagtaaactatgggaggccagagaatttcagacaaaagttattgcatcggtaactcagaaactaattcctaaaactcttgacacatttatccagagggctagtgccaatatagaaatggaaatcattgtcaagggccgctgtgtacctggaattaaaatccatcatttctcagagcagagagctatgattttggcagaatatgaatactcctgcctttcaccactatctttcctcaaaaataggtcctttatttttcagaagaacaagacaaattcggctctttttgtctttttgtttatctccttaagaaccacttgtttacatgttcttctcaaatattgctatctttgacagtccctcatttaaaccgaaagccctccttttccttcaattgcaccagttttattgtggatggaaatcctgctgggtacggtaacagagaacaaactttacagcagcaataatcccttctacagcatctattgtggggaaactcaatacacttttattaaatggctgaagaattagcttcagtgacctgaattaactacagagagaaaagatagggaagaagactacctccttcattcagcagacacccaccgcatgccagagaccagagacataaagctaccatccaggagcaccgcgctgaaagagatggtggatggtcttaggcgatgccttcatcaccaaaagttagcaaaggcagaaaagatttggtgggaattagtgttagcaagcgcatgcagaaatgggcccccgatttactgtggcaggattgacgatatgcctaaatgtgcacacattttgactctgattctaagaatttgtccttaggccgtatttagataagtacacagagttagctttggcataatcatgatcaagaaaaaatcagaagcaatgcacaggtcattaaaaatgcaatcattaaaatgatactgtaatctatattgtcttgtgacataccatcaagtgagaaagtgcaaccacagagtatatgtactatggtctcattcatgaaaaattaaaatggattaaaatggacaggttgggcttgatgcagtggctcacacctgcaatctcagcactttgggaggctgaggcaggtggatggcttgaatccaggaattggagaccagcctgggtaagacagtgagaccctgtctctgcaaaaaaatgcaaaaattatccaggtgtggtggctcacagctgtagtcccagctactcaggaggctgaggtaggaggatcacctaaacctggggaggttaagcctgcaatgagctgtgatcacaccactgcactccagtctggaccatacagcaagaccctgtctcaagacagaaaaaaaaaaaaaaaaacaacctgacaggttgtttccttaggtggtgactatggttattgctggacaatggtattctaggtgacttttactttccattatcagcctttctgaatagttggattttcaatgctttttattttttacagtgagcatcactttatatttagggggtggaaatatttaaaaaaatttatttaatggaaagctagtttttcccttaatcctttaccacttgtactgccataccaaagcccaacctactggtaaaaaaaaaaaaaatgtgaaatattgtgatgatttcatagatgtataaataagccaaaacccaccatcaaatcatacacttttttttttgagacaagagtctgtatcgccaggctggaatgcagtggcgatctctgctcactgcaacctccacctccctggttcaagtgattctcctgcctcagcctccctagtagctgggacctcaggtgtgcaccaccatacccagctattttttgtatttttagtagagacagggtttcaccatgttgggcaggatggtttcaatctcttgacctcatgatccgcccaccttggcctcccaaagtgacactttttgtacatgtaatttattatacatcaattatacctcaataaaattgtttttaaggaaagaaaatatcaaataatctaggtaatttttattttacacacaaaccactcaaaataagtaagtaaataaatccacacacacacacacactcgcagacatttatgaatcaatgctggaaagtaaattcgatggtccaatcagtgacaggaggctatttcaagaggttaatagcatgagcaaggtgtaaaagtgttcatttaatttattctctattctctgacagtgtcagtatccttgattataggtgggtgccgagctcgccatttcacctgcttccatctttttctgttggcactttttgcaaagtccacgtcagtcttaggtaccttttaccccaaaatacatgcttcggtgcactttaattttcctgcagtaaataaatagttcttactagcttccgtcttaagtaactgtagagcaaacctgagggttccgagactttctatcagataaaattctgaaaaccaatcattctttctagagataattttgaatagagtgatacatgttttgaagacatttccttgagtctacttactggcaggttttctcaactatatatattctttcttgtgatactagctactcaaatagtccaaagagctgcatttgccttaaacagaatatgacaaaaggaatgccagtggtgagactgggttcgtgaattggatctctaagtttgttggactaaaaggaaataagtatttgcatgttgctgtcagaatcactgtcctcagtgccacttcgagtcccatctcttggtgcccatgaagaatgtgagtcctgaagtccctgcaaggacatgaccctgtccacatgttaggcctaattctcatatctgtttctctatgcttttctcctctgttttccaatgcaaccagttggacagtgctccagggaagaatcgggcgtccagacaacccatttcgagtggccctggaatacatctccagtggaaaccgcagcttgtctgcagtggacttctttgccctgaagaactgcagtgaaggtatctgaatctggctttcccacgctccttggtagcctattgtgttagatgtgtcaataacctgcaaccatgtttggctgggaatgtgcacacttatgaagaaaagtctagagtgggctgggtgctgtggctcacacctgtaatcccagcactttgggaggccgagacgggtggatcacttgaggtcaagagttcaagaccagcctggccaacatggcaaaaccctgtctctactaaaattacaaaaattagcctggtgtggtgatgtgcgtctgtaatcccaactacttgggagtctgaggcaggagaattgcttgaacctgggagacagaggtcacagcgagccaagattgtgccgttgcactccagcctgggcaacagagcgaaacccagtctcaaaaaaaaaaaaagtctagagtgttttaggggctagttctgaatgataccaggtgatccatatcccagataatcaatttcaaagagctggtataaaatgatatctaccttgagaacacataggcacatagaagggaacagcagacattggggcctaacggagggtggagagggaagggtgggaggagggagaggatcaggggcccaagaatgaagcgtggacccagaggaagcctgaggcactcccagacctaaattctcaatttaggctattcctgaataactttgaaggcccatgtcccacagtcatctgttccatgtacaggcctggatttgaactttgtgcctctgggaagtggtgtgtgaaagggattctcttagggaggaagccctactgacccctcaccaacccagcttcttttgcccctgtggctcttcatttattgctggctttgcaggaaattttatagtgtattttgttttcgttgtttaatcaaaactggtttatgtgtggggaaaagaaaaatcaccataatgtgatagattgaaccacagttcaagttgaaaaggtggttaacctatgatatgaggcaatgtataagaaacatgtggcttgggagcaagccaggagcttgtacaaatgtttccgcactcatgaacttgaagatttgtgaatgtctctggacatcatcagtcctcacagatgtcaaggatctatgtaccatacaaaagaggccatctgttgaaatggaaccagttaacaagaatgtggcagggagaaagtatcaattcccagaatgttctcatttgatcatcattaggaaaaaggaataagaaactgcaaaagtccagatatcaggcccacaacaaatactcctgcaaaaatttcttgacctgaaaaaaattctttgcatgttaaaatcaaggatctcaagctatagatgttttctcccttgccctgcaactccctctcacctaaaaacattcatcccccatagcctgtgttgcattcgcagtgagtctgttccagagacccgttcctgtctgcttttctatctttacaaaaccaatagagttgacctccctaaaatctctctaattttttctaatctttctaatctcagaaagtctccgctggcagggcaccctcttagaggagggagaagatgagtcttcctctgattccctagagaaagtggcttggcccagatacctggggaagttctcatggtccagcttccttctttcagtggctctagctccaagaacagatggtctccatgaggaggcaaatgttctctgtgattcttctctgggtcagaccgcctgtggtcaacaagggatggggagggattgattgatacggatgtgtaaggcagagaatagtgaagaacaaggtgatctcagtgtttgcttagaacttctaaatttccttcccatagaagacaaattcaggtgcgcatcagtaggcatagacaaattgcagacataagaatcatcctaaaattacactcatatttaaagggaaggggttactttaaaggcatactcaatgtctattcgatgtaggcaaatgtctatgttttctggggtcattgctttggttaagccagaagaagaggggataaaaggagaaaaatggtgtctttgaaggaggtgaatagggctggcaacattactggccaggactgtaggaaggtctgcaggatgcctggtctatatttctgataagaacttggtcccttcatgatgaggcacagatggagcacaaggggaaacacaactgtagaactccacagctcttccttggcccacagcagagacgtgccattttagttcatctggagaaggctcaaggagacatgggacaattctccccgcattggagacaatatctatctgtgggtgtcatcaagacagaggccatgcctgtatcctctctacatccttacacttatcacagtgtgtgacactaggtaggtgctcagttcatctcagttgatatggactaatagcaaaaagctaacattgacagagcactcgccatgcgcaaagccaagtgtcaatgcctttatgtgttacatcatgcaagctttacgataatgctgtaaagcagggactaatatcctcattttacagatggggaaactgaagctcacagaagtttcaaaacttgccagggtcattcagttagtgaaaagtagagtcaaactcgatcccaagttgatctgatgacaaagccagtgtttctgtccactagcctctgctgcctttgtggaagaggctgaggtttcatttatttcctgaaaaccttagcatcatctttgactcttcctgttccttttaccactacacccaaattgccagaacctttacctctagacttgcttttgcctgtattctatctgtctctgtctagatacttgatatggtttggatttgtgtcttccccttcccaccaaatttcatgttgaattataatcctcagtgttggaggagggggctggtgggtaattggatcatggaggaggatctccctcttgctattctcgtgatagtgagtgagttctcataagatctggatgtttaaaagtgtgcagtgggccaggcacggtggctaatgcctataatcccaacactttgtgaggctgaggtgggcggattacctgaggtcgggagttcgagaccagcctgaccaacatggagaaaccccgtctctactaaaaaaacaaaaaacaaacaaacaaaaattagccaggcgtggtggcacatgcctgtaatcccaactactcaggaggctgaggcaggagaatcgcttgaacctgggaggcggaggttgcggtgagccaagatggcaccattgcactccagcctgggcaacaagagtgaaactccgtctcaaaagacaaaaacaaaaacaaaagtgtgcagcagccaggcaaggtggctcatgcctgtaatcccagcactttgggaggctgaggcaggtggatcacgaggtcaagagatcaagaccatcctggccaacatggtgaaaccccgtctctactaaaaatacaaaaattagctgggcatggttgtgggcggctgtagtcccagctccccgggaggctgaggcaggagaatcacttgaacccaggaggcagaggttacagtaagctgagatcgtgccagtgcactccagcctggtgacagagtgagactctgtcttaaaaaaaaaaaaaaaaaaagtgtgcagcaccttcctcattgctcttttcctcctgctttagccgtgtaggatgtgcctgcttcccttttgccttctaccatgattgcaagtttcctaaggcctccccagccatgcttcctgtacagcctgtggaaccatgagccaattaatcctcttttctttataaattacccagtctcaggtatttctttacagcagtgtgagaatggactaacacaatactactgttgctgtctcttggatatacccttctgacttcatattcccagctgtgtgtcttattctttctatattcttcatatacgcagacttgaattttggcagcagccaactggtctccctgataccattccatcttccacacgttgccagataaatctcctcaatattactccttcttttgtggcgctttcatgtgacataggtcatttcttattgcctcccacatcagaaaataatagaaaaaggggcctatactggaccaccttactcatttcctggggccaggaaatgtcatttgcagccacagaaattctccttggaagactttatactctacatctaaatttagtaggtgttttataattgtttccaatttaatcattttgggatcctaacttgaagttcaagaccttgtcttacatttcttttatttctccagggagcagctagcatggtgctaaacacacagaaaacaccacacgaatacatgttgactgattggttaatcaatcaattgataaatgctgcaccttcttttatagctttgggctattaccctactacttccaaaagaaagtagctgtaagtagaaatggcttggaagagatttttcactgaaaggccagtgaaagagcagcttacacaatcagcacaggcaagagagacatcagcccccagagacacccatgcctgggctcccagggaacccttagcccattcacaaaaacctttcttgagcagacaacccagagcaataggatcacgcaggacactcaccgggacccctcaggttcagaggtgcctacagcaacacatacgtcagaatgggaaagactagcttcttgaaagggatttgaaaaggaccagtgtgccaggcgtggtggctcatgcctgtaattccagcactttgggaggccaaggtgggtggatcacctgaggtcaggagttcgagaccagcctggccaacgtcgcgaaaccccatctttactgaaaatacaaaaaaagtagccaggcatggtggcatgcacctgtggtctcagctactcgggaggctgaggcagaagcttgaacccgggaggcagaggttgcagtgagctgagatggcaccactgcactccagcctgggtgacagagcaagactctgtcaaaaagaaagagagggagggaggggaggggaggggaggatcagcatggccctgaacagctcctaaaaatgcacagcattgcaaaccctcatctagctcttccatgcactaggccctgttctaagcatggtacatatattaactcattcaatccttacaacaatgctatgaagtatgtaatattattcttatcattattattcccattattatggatagagaaatcaaggcacggagacctaagtaatttcctcaaagtcacacagctggtattgaaatggaggccatctggctccaaaatccatgttcttagctaccacaccttgcagtttgcacagaagatctctgctggaagggacaccagaaatatctaatctgtctcccttgccatgtagaaattgaatgaacaaagacccaatgattttccttgaaatgtgatacactaaattactgaccagcccaaggtgctttctgcctccaccttatggttgtcaagttctcaatttttctaagaaatcaattcagtatttccctttcccagctcagattgttcagaggcagttgaaatggaccactgccactagtcaatatgaagacaaagagctgcaaaggagctcccccatgaaaaacaaggaaatgtagatagctcctgtgtgagcctacatacattttatagcaggccactatatctcctcttctctttcaggaacctacaaaaacacatctgaggtttcccaggccacagccacattcagctcactaacagatttctcaaaagaagtaatcttcttggttccttactctactgagataatttcatacacattgcttctgattcattcattagagaggatgtcataaccttcaccttacccgtgagaagttatttctctaacttctctggctcaggaaggtgaaggtatccaaagtcaaatgcagtcccattattatggataccttgaaacacatgtccccaaagagtctgagatgcacaaataccattttttaacttctccggggctaaaatgagggtgtttgaactctcttcaaaccttttctagagcctgaagccttaattaaaacaaagtcttatatggaagcccagtatataaaatgatacaagtacagctgtctttgggggcgcctagaacccacctgttccagagcccttgacattccccctcaatggggcttcatgaaatacattttaagaaccattggacagtctgattctaagctctctcttttttttttttttttttgagatgtagtctcactctgttgcccaggctggagtacagtggcgccatctcagctcactgcaacctccacctcctgggttcaaggaattctcctgcctcaggctcctgagtagctgggattacaggcgcaagccaccacgcctggctaatttttgtattttcagtagagacggggtttcaccatgttggtcaggctggtctcgaactcctgacctcgtgatccgcccaccctggcttcccaagtgctgggattacaggtgtgagccaccacgcccggcctcagctctcctattaactccagtttttatggtctggtcctagatgttacacttatttaaaatatgaaaaccaaaaataggtatattaactgtatcttatttaaaaaattagggcttagcacaaggctattagactttgaatatgggccattttcacaaggcaagttcttgtccaggtgggttctggctttgaggtgctggatatgtagctagtataaatatttccaggaaaaaatgggtagcatcctgtaaccttgtccccctctctctccttcttctccaccaaagacaatgttgggcaatggaagatgtctttcttagcctgaaaggggacaagaggaaacgaaagaagctgaacaaatagattcaaatctttggccagccatgtggaaccaatcaacatctagagtaggctccaaaatccagctgggtaaatgagggattacttcatgggctcctagcagcctggcccaaactgggcattttctcttccaacagcaagcaacgcctcagcaggatcctcagtctgtgcttgtaaaatgtagatcacagtggcactctgtcttggggctgccagcagcaaactctgtatgtagcaggctcagctatccatccatccatgcatccactcatctatgccacagacagtttctgagcaagtactaaactgggtacatgctaacattaatataaaatagttgtttctgtcttaggactgaattttggtgtggttcctttaacatttccattctacttcacatagaactctttcttaaagggcatctttgagttatatttaatttgcaccctaaccctaaccctaagggttgtaagggtttgtgcaaagtaagtgcaaatcttacgaagagtttgtaagagttaaagaaagaggaaagaaacacaaaatgcggctcaatggttaaaaacagatttattttagagaaaataaacctgagaggggcttctggccaattttggtcaggagagctttctcttacagactaagagtatatattggttttacagtgagcaggcttatcacaagcttggaatgtttctgtgtgggggagaagtttatggggggttggaatttctctggacggaggagaggttatcttggggctgacatctttccggccagagggagactatctcggggctagcatgtctctggttggggaggagtttggaatgtttctggtcagagatgttatttgtggtttatggtcatgctgaccttggccattaggctgatgtcctttggatttaggtggtttttgattaagatgaactttaggatgaggtgcttgtccaagatggcagtgctcctcctctgtcagtactgaataggtgttccattcctggaaatgtcttcctccaaagcagttccaacattcctttctcagaaagaccacagaatgagcactgaaccagaatcagaaaacctggatttaagtctccttcctacctcttacttgccatagactagccatcacacttcaaatcattaaagatttccctcataactggaacatagattgggtttttgtggggtttttttgtcatttaaaatagagataggccaggcgcagtggctcacacctgtaatcccagcactttgggaggccgaggcgggcagatcacgaggtcaggagatcaagaccatcctggccaacatggtgaaaccctgtctctactgaaatacaaagaattagctaagcatggtggtgggcgcctgtagtcccagctacttggggggctgaggcaggagaatggcatgaacctgggaggcagagcttgcagtgagccgaggtggtgccactgcactccagcctgggagacagcgagactccgtctcaaaaaaataaataaataaaaataaaaataaaataaaatagggataacaacatgtcagtagttgtctcaaaattgacctcatgctgagggtcagtgagaaggtggctgtggaggtgccttgtaaatgatgccatgagctacttaacctctctgggcctcacctcgcctgaagcttttgagaactaacctgcttccttgctgctgctgtttctcatgaagaaattaccattcacagaaacaaactggctcctctgaggcctcctgcagagctttgtgatgttaattattgacctaatgccaagagggtgatgagagccacacactgccaacctggggaggtgccaccacctggagcagtcacttcagggcactcaatcagccgtgcaatggtgagctctattgcttggaagtgatcaccaaggagaaatcgcagtcacgaccttagtatcctcacttagttctagtgcctatctccaggtggatgttcaactccattttaaaaacgctctccttctaaactccctatttccaaaatctcctgcccttaacttaccgtggactgaaccatttaaaagataagcatgaaaattatgatttcatcagccactgagatctgcttgcatttctcaaatgtccctccccagctcaagctttggttccatctgcgccccctgcagcgcaccctccacctttcaaagacctgcacatctttcaaatcccagcttaaatagtattttctctaagtctccactcagaattgtttccatgtatatctattttagaaccgtctacttctctccagttatttatgtgtctcactcaatagatgctaagttcctaaaatcaaagactgtctttttttaaaatctctgtatctcaattagcagtgaagtgcttttttttttttcatggcaagcactcaataaaggtttgcttattccaatgtaggagagagattagaggctttagaatcagactgaatgtatttggatgccagctccatcgctcaccacctttttgagcttggaaaagtttcctaaatctatgagttttcattttctcatcaggaaatacataattataggttttttgggaaattaaaacagatgttgcgtgcagagctcctagcacaatgcttggcacaatacgtattctcatcctctctctggcatcccttgactaagctgaatctcctaattctggaaccagagctgaataattctgcacaactatcctggggtatgtttacaggttcacatctgccttttgcctttccatctgcgccttgcctgagccattatgcaaagggaaaatttacctcttttccagcagagattctgacagcccagacttgctttctgattgcaaaggcagctgcttctcttgcctcctaagacctatgctcttatgcctgataaagtcatttttttaccttggtcactgggtgcacagagtcctttgtgccacacaaaggagtaatcctgcttaattctgtagaggtagttggaggcaggagagaggtcttttcaaatgcctgtcacactgcctcccttgaggaagactggaatccaaaacagtcaggccaaagcaggtggaaccaggaaggaaattcgctggtctttcctttctctaccagtgcctagctactgttggcaaagaagttcttactttggaatggcttatccataattattaataaagccaattttaaaatgccccatgaagtgcttagaaacaatgcctgcttgggcaactattttaaatattcgatcattggaacttgcccagaaatgggggcagacacaaaggtttttaaatataaataaataaagaatgagtgtgccgaggtcattgtactcccagaagaaaattactttcaaattacaactacataaaggaaataattgaaaagattaatcacactaaaataattggtctattttacaagtaatttggagcaatactcagtcattgacatcaatgtctggtagtaaaatagtaatgaatttcattctctaactaatgtatttattttattaatggtaataaatggtgttgttaccgcttataaatatttcataacttttaattcattaaaatgttcaatgaatttccaaaagtatttattagttttacatcatccttagtattcaatgtgcaattgccactctgcctgggtaattaaaaatattattgttttgggtaatgggactccctttgaatgtgaaggattaggctccagttattaatgagacggatgctccagctggtgatggggaaggggcttgggaagatgttttctctttaggtcgctaagagctctctggaatcgttccttaaaaaaaatgtggctgtgaagcaaacagggtggacccagataaattaattccagatgtgatcagagaaatgtcactttagacattggttccagttcaccacctgtcccacaccatctccgtcttcctgaaacaactgacagcaggattcaaactttccaacctcacctctatctctgttttattctccaacattagaggtcataaggagtgaaatggccaaaaagatgcaacagaaagaaaagcaagggatacagcatcatggacagtggaaagaagatataggacttggagaagaaaaacgtggacttgaatcctgagtcatttgggtgctacatgtccattacatcctgtggtaccagataattcacgtgcgaaatgaagacagtgacacctatccctgggtccatgtgaggattaaatgggatactgtgtgcctcacctgacacagtgcctggaacctagtggaaaatcaaactgggttagctctaccattccctgtgtccaaattgcagatcatggtattgttggcccagtggccttggcggctcttcattaactaacaattgatacaaacaattggtatgagtcatcaagaaaaactggaccaacagtgaactagtacaactcaggatcggtgaagtgaaatggcatcccctggaagaaggactagatgactcagctctcagcaccttaccctgtaggtctgagattcagctcactgtagtacttccagagcctctccatacaggaggctaaaggcatttggctatggacaggttgagaggtaccaacaggtgggttggggtaaagtggggccagcactcacacttagatgtttgcacctgcaggatgtgtagcaatgctcccaaagcatgcaaacccaaagaatcagtgtggctcatctttcaagagcttcagttttaccaaaagattggagtggaggaatattttttaatttaaactagcatggctatgtattgagttccaatgcaaactgcacgcaaatgttaagataaagcatcgaagaccttccctgctcatagtgattacccacactctgagtggtggctttactcttctttgccatttgggacacatcagaggggacaatagtaaggcatcactccagggtggacagaggaacatgaggaggaggtgcagccaggcctgggatcaccagctggagaggagagccagggagtagtgtgtcttctcagtgcaagccattggcaggtgcaacagtgggcaggatcctgaggtgacaccagagactagcagggggtccaatctcccaaatcaggcagagaagtgctcagtttctaaactgacgtaccaagtcagaaccaaacccaccaaacattagatataaaagtctcctgtgattggcctaaagtatcataaatgtccccaaggacagaattgatctgttgatttgttttgtttgtttggtggggtagggtggggaagggtgaggtggggagaggtaagcaaggactgaacctttagctgaagatcctggagacattttacttcctccctacccagacccctggacagagctcctcacaccaggatctgtgggaagctcacgctgaagtcttccagagtgaagggctttgtgcagggagtgagggagccttttgctagccgaggggcatagcctaggagtaccagaaagtgtactgctgggatttgatgatggttctctttttattctggttattttaaagttctggcattttctgtcttcaagttatgctgagagcacggtttttgtggaactttattttgcccttctggttgagatttgtttggggaggaaacattggcagacagttgctgggcagcggcccagaaggcccctcaatgcacaatttgcaaaccatagagcaaatggtctcggagatccctccttccctcagctccaacattatggagttctatgatcagcatttgggtggatataaagtctttcagcttttgctgcttctgcttcttcctttagctcttagccagcatttcgtatctacaaaacgattaacaaacattaactaattccccccattaatcatttatatcactggtagctcagagtcttatcatttccttcaagaacatttccttcaagacaggtgcaatatcctgtctggatcccaagtctcacgtctaggggatgatgggccaacatggcagccctggatcctcctgagctcacaggggaagtgggccagaaggtgggcacgggctctgtgaggctacaaccccactaggatgcctttctgctctaattaacaggaagggccagccacatggccagccaatggtagctaagaggcaataagctttaattagaagcttcttcctggaaactcacatggtcataataagtctgtggtcttaaaaggcccagagaggttgaatgcctcaactctcttttgcttttatgagctgatcctttcaatcgtttgtgaaatttaaatataatggaaacattggctctggacaagggccctgattatctcctccttgctacagggacgggcagcccaagtgtaaggtcaggaaggcagcctgttttcttcccatcctaggctgtctgtaagatttatgattcagaaacacaccacacgtgtgtgaataagctgccatggctgggaccaaccacagaactctcccttagagggggccagtttgtctcggggaggactagacagggaacaagccctctgcacaccactacccagagatccaggagaacaagtgaatagctcaaagcctctgtcctgaggacttgggcttatgagtgtatgaaggtggggtgcaaaatttcttgaactacatgatttgaattagaagagaaagcagaaagtgacaggaagaagtggtctctgttttcctccttgtcttaccatcacaggatcgatgtctttctttcttgttagtgcacggacacaaactcatgctcgctccctgcacactctctctccccaagagatccactgtgcacgtgtgtcaactaatgcacgagggctgtcttcttgtccatcccctgccattcttccactgatgtggcctttttctccattctattcttcctgttccttatctgtggctgtatgtaatgcaaaagcaggtgctcgactcagaaccatatcatttatttattccgtgtgatcataaataaataaatgcagacagatcattttccatctcaactgtttggcagctcatggacagccttcccctgcatctccccagcctcagcctcttctgtgtgcctctccacactccggatatctttgtctttttgcttgtctattaattcattctcacttctcgactttcttcctttccttttgtgaagggaagaaacctgggccgtggaattgcctgtctgatccatgtgtccagctccgtcatcagtgaagcctgctgtgctcttgctccaggcacaggcctgaggctgtatatccatggacaaggtggctgaaatggttggatcggctacactggagcccagctccagggcatacacagatggaatattcttctcttttcatccttactctaagcaaagatcctctgatgatctctcttccctttccccttctgctatttctcctccttttccttcaagtgcctgtcattttctcattaggagaccaacacacacacacacacacacacacacaaatatgcacgtgtgcacacacacacaaccagcaaggaggcatttgaatgtggtgatcctaaagaggacctcaggggcaaggctgaggtctttaattagagattgaggtcttatccaaggctgaggtcttccctagtgccagtcacatggcaaaagcaaggctctaggtagataagaaggtccagcattttcctgtgagtgtcaagaagttacattggagctaagattgcagtctctgcatgggaagacactggaaagcagggtcttgagaagagtcttttctcttctggggtcagcaaagcacagagccttaaattcatggcgagtgctggcggttttttgatgtatgtttgtttatttgttttgcccttgtcttttcctagtcttcagtaaaatcatattgaacgttccagcttatcttggttgtactcccagagttttgactaggcttttgccagggttttaaagggtttaaatatcacccctgagaacagatggatgatggcagtagtgatccatgggatactccaaacaaatgccaagtctcagaaaaaggaggaggaagacagggaagaaaagagagagaaagggagaaaaaggctatgaggtcttaccacttcccactctatgaagttctccttttgtgcccaacctggaagttctgagcttgtattaaggaaagtgaaatttccctacctggtatattccctatcagacatataaactggtctgtccatttccccaccacctggtaatttgattttgcaacaagaagccctacttctagaaccaaggcaggagactttactagagaattcaaattctttggatttttgaaaattttatttgcatactcatgttattatattacctgttgcaacatcaccagaaattccgctgacgtatgaggggccactgtctctcatcactgagtgttgcttttcagagatgaaaaaaattggaaaggaagtcacacagccaccatttgacaagttattttgtggggtgtagaattcctcccactgtaccaccatcccagcccttggttctggcacacaggcaatctcattccatatgatatgaggagcagcccagtgttctgtctgcaaagctctggcaagctcaagcaaggcttcccattacccaggtgggtcatccatgtgccacagcctatttgactttagcgtctgttatttttccctcctgctaaacactaagccatcccctttatctccacatccctggtgtttggctcaaagcctgggacaaaatggaggctccatgaatttttgtaaaatgttgaaagagtgaatgaaaaagtgagtcaaaatggtgcggcacgggaaactataaacacaaagctgagtaggaaattgagatcagtagctagaaaatgtaaataaggcaaatatattaatatttcagatgatttcagagattcatttaatcactttacataggcattcaactttgtaattataggcaaagacaaataagccaagtagcataagcttagattctagattctcccctgccaatataataacagcaatgacaataataacaataataataaattgcaagaatgggcccttcaatacacaacatctagaaactccttccctaggtcccgagcactgccagcactactcagggagctgatcaattatgtacgcaccccagcatgagttgcttaaggtgtaaccttgccactgctctgaggatcttacaatggaacagaagaatttgctatatcctgtcacctctcttgccccctggggtttcagttgactatacaattttgtactgttgaaactcacaagagtcatataatttaacatctggaaaggatctaaaggatttctttgtcttccttcctccctcattttacagattagcagattgaatcccaaagacattatggttctacagctaccaagtggccaagtcatgagtttttaacctcctattctgttgtttctttgactgctccctgcccttcttaatcttgaaaatattagaaaatgactttaaagtctctgtgtttatgtttctcaatacactggaacctttgtcccgaatccttaccctccagcacagagcctggcacacactggttgctcagtcaccctccagcacagagcctggcacatactggatgcacacactgaaataaatggaacacatggcatccagataaattattaaatggataataggcacactagaaccttatatctcggcttgtattttcaaaaagaggacggcccaagctcagcccagggaagcggcgtgtttgaaaagagagtaatgacgggaggaagaaaagccagaccagctggaatatgaaagaactgaccaattggaaaggaccttcaggagcatatagagaatataaatcttacattctatatgcaaaaattaaaaattaaacttagctctttggaaaacccatttccgtcaatggcaaacagcttaatctaactaatttagagtaaactctgacacttggcaattttttcctcccttttggatagataatcagataattcagaattgttcttctctcattctccatatcattcctctgaagtgtaagtaaacatgggaaggcttctgtatcatcctagtattggaagagccatctactcccttctccactgagactcactccatgttggtctctggtcatgggcccagcctgagtgtgactgaaggagtccttgctggcaggtcattaggtccacacagatcactctgtctccatccacaggacctccaggtctgcccacaccctctcgaccacctctgggcccctctcagggcgacactgagaccctcaaagctctcctatgcttctctgggttcccaggccctatctgccaagggctccccactgccctcctcaactcccctgactaccaaagcggtccagtgctaacttggggcacacaggtcatctggttcccaagctccctcaacctttctggtaaagtctcaggtagggaatgcacccaccttgttgctcctgcagggcccctctcatgctctccttgtctatttctctctgctcccagcccacagggtctgttccacatcactgcacattctgcctcactctgtgacttttgactacaaatctaggttttggggcctatcaattcttggttccagatattcaaagtttagctttttagactcaaggatgtaatttcactctcaaatagtccatatcttactgctaaaaatctgtattttcaagtgtatctgccctccccaacccaaagtagtgtgcagaaaaagcactagcggctctctaaatggagggaaatgaaggattgggtctgcaaagctcaggaaaaagaaacctcaggcgatgttgcaaagcatcaccatattttgagtcgtaattgtcataataatgagctcattgtagtgccacatccccagactctagttgtccagctgtctctagctaaaataatcaccagagagaggtatcagtgcccttttataaaggtctttatggagaaaatttccatgacagttatgatgggagataaagaactcaaaatattttaaaattctgatgttccattaaatacccaaccctttttggtatcgattgtagtcctgagtcagattcagagcttgtagaactctaggtaaatcctttagttttacaccaaattatctcctggcaaaagatgatgactgaagacaggatgcagagtgtgttctgattcatttttggaaagcaccacttgtgtctttttcctgcacaaggtccccatcatctgtagaataaagtttggagaccttggagctggaccctctttctctggccccaacctgcctgcccagcctctaagtccaacaactgggctcaaccagatccataacctgtcctctgaatgggccagagatggccatcaccctgccctaatcccatctgttcatcaagcaccatcacaaatctcatttcatctccctgaggcatctgtgagtgcttcctatgtttaaactgcacatttggcactaactggccttaaattacctgctgctcatgacttctcatgtaaaacaattttattttaagtaaaagtctatgttttgggcagagtctagcaactcttgcttcagccaacacacatgagaatgtgttcctgctaatctagatggtaaattccctgaggacagcacacctcggtgaaaaaaattttggagccacaaacagcatccaccgaactcaacctctctgagcattggtatttctcattgcaaaataggaatcattataatgccaaccttatagggatgggtttagactcagtgagacaacctatgtaacacactggcacaagaaatgttcaaaacaagctaattctcttccttctttcccatcaagttctctatttcctcctcttcctcttctcagccttcattcaccaaaatgggtcctgctaactcacatgatggtacaatgctcaaaataatatgtgcatcataaagatgggctcagtgttggatgatgaatggatgaattaattaataagactaaatgaaatgtaaggattgctccgtcacccacgcctgttccctgttccacatttggtctctacaaggatggcctcacccagccttgggaagcctcctgaccactgtctggagccctgactcttctttggccatttttctaagaaacgcttagcaaggaccctacactgggcttcagttttcttgatagtgaaatccaggatgtatgtaaggaaggatagttggctccatgctcaaggatggtgtgtccttcagaaggaactggcaggatttctatcagaaccccattcccttctgctgcaagtgtgccagggtcttctggcctttctaagcagtgacatgaagtccatggtgagctgacttggttagctggtccttccccagctccacctccgacccatgatgcagagaagtcaccatagcaactcaccatactccatttccccttccaggaggggacagagaaacaacagcaaccaaagcctctcagccattccaggtgttatcatgacccaagctgggcatttattttctgggtctgaaaacaccaggtatctgccgtagaacttgggtggctgtcttagacacatgtatctgaatagcctccctttcgttaatctctaaccatgaaggattctaattcaatgtagaatattagtacagtaatattcagattttccccattttgaatctgtgtttatagcccataataataaggaactgtgaggttgggtgacactttaaggacttagatttagtttggtgagagcattgaagggttttgtgatctcactcccaaatgggaggaagaaagaagtctcctagaaaaggggatgccacctcatgcccatgttacttcagtttccagctatagtattattatatattctctcaatgctctcaaacagaatgaaatctgggttcctcgatgtgtttttaataacttttctgaagagatggctgagtctgaattgttgactcaaattgtatcagctttccaagaatcttgctttcagaggtgagaatgatgaattaaagagttacttacttggatttttaaaatgtgtccatcactgaggcccctgggcttgtgtacaaagattaaaaggtactattcccccaggaagatagactgaatcacctgtatacatgccaagacaactacagtctaggtagccatacagtcctggcctacagatccagaagtggtggtactccagcaagctcacccagctagaagacatgtctcagtagaagcagagctctcatgagggtgtgagagatgaggccaggtgatttctacctacactttcaagtcaggagacagacctctctggggctgagggctgtgagctcagaaaggcgccactccatggagaaggctatgcctccagttccctagatatgctgttatccaagaaacagcccagctgtcatcggtgaaggcccctaggaagaaggaagccaaagtgggttctgtggttccagagaagagacattcccagagccattgatttatgttagtgcataccccaggctctgcctgagaagagaagagatccctgaaacccacattcttagaaaaaggttctagatagccattatgagagagaaactggggcttgcccacttttactgaggactcctggagagaggaagaggcaagtacaaagggaagggaaggaaaatggaaagggaaaagcagccaggcaagtcatggatgttgatgaaaacattcccagaaacatcttccccttccttccacacacaatggtggtgatgtgatggaaatactagatggggagttactgttgtagcaacccatgtaaatgggaaccaatggaagagaaattatatatgccttgcatttcattcaatgttttttctgtttgtttgtttgttcatttgtttgtttgggagtggggattgtacctgctatttgctggcatcaaactaggtgccgggcaatataaatatgaaggcaattaaaccaagttttctggccttaaagagctcagtacagtggataagacagataaagaagggactacaatatagtgaggtgaatgagacgcagtgctgtggaaatgggggaggatgcagtgactgtgtgaaggatgataatacaacaaagccacagagtgagtgcagaacagaagagcacagacattctactcatctcctgggatccatccagctccatgacacctctccaaactctccttccctctccccaggagcactgatagattcccgtaactgtggacacacccctcttaggagggtctttccacaccttgtcacacatttaaccctctgcctccttctaatatactgtcagctccttgtatgcaagaaccatgttttcttcatgtttgcctctttagcacctagaatattgaagctgaatactatgtgccagattgtgagttgctagtgtttgttggcaggaaagaaagaaggaaggaaggaaaaagagaaggaaggaaatgaatttctccaacttccagaacttcttcccattacctcccgtccttctcctgtatttggctccttttttgttccatccagtaactccttctttccccctgttctcttcgattcttcctgcccaccacccatcaatccattccggagccctccctttcactttccatcctttgtcttcctttctctgtttctcctccaggtccttccctttttccacttcttgtctgaccccctaagcctttgtgtcctttctccatccttctctccctaatttcccattacttggggcagggtcagaggtctgctatggctcatgaggaacaatgaagtgatgaaaaaggatgggctaaagattatttgtttcaaagacagtcgaaggaatggtgacagctttcaaatggggcataaaccaagttaagccttcagtcaataaacaaagaaccaggacctccaaccagatagcggttgtagatataggccacaatatacaaggatcacgtggccaaccagttttgagggtttccagcccaaagcagaagtcctgggagagcctgtgccccactgaaaaagaccctacatggtgaccccaaattgcagaccccacagggatcgcctgtcccagccttacaacttgggaagccctagcaccagagagattaagtgacttacccaaggttacatagcaagtcacagctgagtcagaaccacagctcagcttctccactgctggcccagtgttttcccactataacgcattgcctgtagctccagcaaatgcatttcctacgcgccaggattgatgcagccagcatacagggagtcattcttcctgctgagaaatgcatccagttatggggaggaaggtgacagctgtttaatagcagctctgtgggatggttctggacttggaatgtggaatattatctcctgctaatgcattagcagagacgaggggaaacagaatgtaattacccaaacggctgtttttcccggatactaaaatgaattctcccaccctggtgaataatgtggacggtctttaacaattggtttatgccccatctgaaagctgtcaccactcctaatagcacagggacctgtcttgccagtcaggggtattgatttgagactgcgtcggcgatctgctcgtggattcatcagcttcctgagagagacgccccaaaaaggaagatccagggggactttgctgctggacttctgacagcatggcctcggggcctccctcaaatatgcccatgcttctctgcatctctgcatctctgcatctagctgagccctagcagtttatgtggtttcaggcccatgaccaggggtggtgggagggtccaatccaaagtgaagatttagagaaataccccattcttaggagaacccagaacaagtaagcttctgaccactcatctttgcacaaacctcatagataaataccaactagaaagcacataaattaagtataattaattcatctcatcaacctagaaataacttctcttctaaatgtctgtgggcttttattttttaccaccattatggcccttatgcttcaccacaattcctagttatttgtgctcctgtcatatctgccctaagactgcaactctttgaggataagagtccatgaatcatttctgtattctcacatcacctaacacctaccacagagctgtacacgggaaagatgcccaataaatcaaatctcaacatgaagtcattgacaaacacatggcttcagaggaaagaatccatcgtgggcaggacgagccttgtgtcaggagctctgggcaatgtgctatctctgcacttcctgtctccagaggtcagaaggctacacagaggctagaccagggacaggagaggattagctgaccaagggcaggacagcagtgcattatccaaaaagaaaggaaatggagtccactcagactaaataagacctgggacccagaagcctcactcatggctgtgaagactcttcccagagagggaagggccaggactgggaaggccaactgtgccagaaaagccatgaatcatggcttgcaatcttggcccttaggaagaaggaaaccaaagtgggttctgtggtcccagagaagagacattctcagagccattgatttattttagtgcacacctcaggctctgcctgagaagaagagagatccctgagacccacattcttagaaaaaggttctagatagccattatgagagggaaactgaggcctgcccacttctactgagtacccctggagagaggaacagctttcagactgtggaaacgtcatggtctggatgtgagaaggaaattggaatgcaggtcaggtcttcttcttctcagtgatgaggaagcatctggacaaagcccaaaaagtcttaggcaccaccaaagggccgtgctgcttaactgtgttaggtggaattatcttcaagacagagacaggagggaagcaggcagcagaccaccacccagctaacaagactgccagcccgggaacaagctgcatggtgctggccgccttctgggagatgagtggctgaagcagcccattcaaaggctttgggagcctttatgaatcgaatctctggaagtccagctagagtgtctattgatcccaaagtcaccttcaagtggaacagccataaattaccagtcagcttttattatgtgagagattttcaaattctaagcctgactttctccttttttattatcctaatgaaataccatgacttggcccagtcttaagaaagcacccagtgaagaaggaacaggatttctgagctaatggactcaagtcctcactgagaagtcctggacaccaaccctgccaggaaccctcctctgtgtgggagacaatctggaagccaaatcacacagatttgatggaacttaaagtgggtggaggtgtggacccagaagtatggaggagacctgggccaccctgaataataccctcttcaagggaggggcattggccgcaatgcaaaccttgactccatccaggaatgacactagtcccagctggtttgtgtgtggatgctgcagtgttagtttttctaaaggctcctttacattctggtttgggtcatccttttagatatacctagaagattctcttttttagtttttttttttaattaccatagcaagaacacttcacatgagatctaccttcttaacaattgttgtaatgcacaacacggtatttttaactataggcataatgttgtacagctgatctctagatatacctagaatattcttaattgtacaactcttagtggaaaaatcctgtgctgaaccatttattactccccaaacatttattaatcatttacgaacgtatataatagggaattgttggtcctcacagagctggtaaggtagtaaggaggaaggatctatgacaactcattataaggaaattaagtaccctcatgggggaagctgtggaagcagagaagtgagcatgtgattccaaatgggagaaaatatatcagtgcctgcccctcactgagaccacagtttattttctggaggtgcagatgagatgctgtacagaaaggtgggcatttgcaggcagagtaaatccatgtccaagtagaactggcaaacaatcaaattccctgacactggagcaaacttaagattgacaagcctcctctacagcacttgggagaacttgctgtcaatcagtctgcttcctgggggccacatgctgggaaacttttgttcttatttggagacaaacaagatggagagccttagactgaaccataggcccaatcactaacactctgtgtgaggcttaaatatttatgtgagattttctccatatttacttctacctgatgttttctccatctttacttttcagctaaggccagaacatttattaaaaattacacaatttgatcacctttttcagtcatcattcagagatttaaatttctaaataaagaaggtaaaatatcttaagaggacagcattgccttttccaaagagtggaaggcctgtcttggttcagttattgttttaatacatttgcagattttcttgcatgaaatgttcatgacacacaaagcaactttataggtactcctgacaaactcagtaccatattggttatggactctggttctgcaagctgacgttctgggctcgagtctcctttctgctgtttaccatctgtgaaaacttggtcaagtcttttgcttcttctcttagcctcttgttaatctgtaaaatagtggaccaaatgggatattgcacattatgtttatcaaagtgattagtacacagggagattttacttttgacccaggaaagggccaagccagtgagatattattaagcatctctgaaatcgagagtatagtttttgagatacaacctcatctaccatatgcaagggaataatcctttcctcctacccctccaggaagatcatagcttagttcagggcccctacctcctgcaaggtcagcctgcagattctgcagggggagcattgacatgaaagagatgctaggtcaaatcccacctggagcttggcatttgacatgggagaccaggaatattccaatggacagacaggtgggggagatggggcctcaggtttgccacagcacccccactatgaccaggaggacagaatgagaattaactctggctgtggtttgaccctaaataacaaaggcatctgccgtgaaagtttgccatgactgctgagatttcaggaataatataactggcctttctagaagctagaagcggtggtatgatgtgctgtgtcaaggaataaagagcccacttctccctggaagagtcacagatgtcttcaaagatcagcgtgagctgagccctgccagcgggggagaaaattgggacagtgagatgtgcagggtattccagatgccaggacagtgatagtggtcatgaggaggagatgagggcaaagaactaactagtgtctgcattgtcaccactaatcattgctgactcatatttagtcctagtgaaggaccaagctttgcattcagcatttaaatgggttagctcgtattcctcactataacccatgtggtagctcatcccaattttggagacagagaacctaaaactcagaggcgttcgttatagctgatatgtaagagcagaagtgagtaccatggcctggttgaatcttcgcactcagttggatgggaaaaagcctgtggtttactcacaaactacctgtgagtagtttgttgtggctgaagccccagagggtgggacttgggggtctctgaagatgtggagcagtcatgggctggatggggaagcttcatttactgagggtttagctcatgcccaggaacctggagaattctttaaccctggctgaactcaggtgtctccttctctgtccaagacagctcagaataaacagcaccctgcagctgcacaagagccctgctgtgtgcagggcccagatggcacgcttgattttctttatttatttggatgtcattttcagtgtgattgagtgattccaccaccccagtgggtctgctcagtctcccatcccaaaatcaggcaggagtggaacaagtttgaggtttctgaaagatacttatttattaattgggccaactctgactaagcagcttttactaaaatctagaaccagaggcagcaaagtgcggagaagggtacactcagggcattccattgtactgtagtgagaatattacttaattttctaacagtttcttccctgggacttttttttttccaaattaaatctgatgtggagaaggagtatagcatagaggttaagaatgtgggttaagagtcagactgcctgaattcaaatccaggtaccaccctcactagccgtgtaagctatagagtaagttatgtaacctctctgagcctcattttcctcatctgcaaaaaagaagttaataatactatttactcttaggattttaaggagataaaatgagttaatacttgcaaaatgtcagcatacaacctggcacatatatagtcctcaggaaacgtcagctattattgctctgcggaacagacacaatcagaagggcccaggctgcatcaggacagaggggccttcagattccacccatgctcccatgcaggctccttggacctcgaggggccttgggcaggtgtctaacaagtgcctcttcaggagggagccttgattttaccatttgccaatttctgtagtgtaaatattcccatgatggctgattataagataccactgtgaggtctccagatgtggaattgggaagagatgcacacaattggctccagcgtgctactctgggagcctaggtggaagccagagagtcttaggtgtccttgtcagctctggctttgtatatcctaactcagggtagcctaaacattggagttaagctccccaccaatgtttggcagatgtgaggaaatggacagagtgtggagcaagcagaaaagagtttggagagttcagggtgttaggttttaatgcctgacctaaaaggcagcacttctgacagttcagtgacttttaattagatgagatcgaatcagcagaactgcttcctgtagctaaaagtctttcccttccagtgcagccattcagttactgctagggcccattgggcaacacgcctcagccgagggatgggatagtggcataaggacatgcattgcagagaccttcaaggacaagtggtgtgtgtgtgtgtgtgtctgtgtgtggtgggtgtgtatgtggtgtgtgtgttagcagggagcataggccaggatggactgaaagtcttgggcttagaaactcaggaattaccctcgtagaaagtgacctgagaaccagagaaattacataaaaacagcactggagtgggaatgtggggacctgggttttaggcccagtgctgcatgactttgttttcccagctgaaaataggagaatcaggatgcccaccatgccttcttcacaggggtgttgtagaatcaaaagacatctcatctgtgaatgcaccacacaaatggaagaggttaatctctactcaactgtgaagtagctaaatgctcatgagtcggccaaacaccttggaaaccaatcagttgctagggaaggtatcaggtatccattcttgtcacaaagaaaagtgggctggccgggcgtagtggctcacgcctataatcccagcactttgggaggccgagacaggtggatcacgaggtcaggagactgagaccatcctggctaacacagtgaaaccccgtctctactaaaaatacaaaaaattagccaggcgcggtggcaggcacctgtagtcctagctacttgggaggctgaggcaggagaatggtgtgaacctgggaggtggagcttgcagtgagccaaggtcgtgccactgcactccagcctgggtgacagagcgagactccatctcaaaaaaaaaaaaaaaaagaaaaagaaaagtgggcatgtggtaagagtagtcatggcctgggactggaaccagaaagctacatgtgccaggaaagcagctcttcatcttgctcctcaaaagaggtgagagcatctcttaggtatcatgccaaagcctctgggttttagcttctctctctctctctctctctctctctaaaactgggacattgagaagaaggatgaagaaggatggtctccggtgcacgatgccatggctcccattgggtgctgctctgctctcctgccttctctgatgagcatggcccagaagggctgccttggccccagatccaccccaggatcattcagctcaaccctcacagacacccagcactatcccagtcttgaattctgaagaaaggaatctgatgggcccagatctggcttttgagcaaggccacatgcatcttaggttgttggccagcttgtgaaagcgcttcccttctatcacagccaggaaggagtcacgcagcgcagagaccacagggccacctaagacagggaagactctgtgaggagtcaggacaggaaacagccacagttggcctctctggaacatcctgtgctcctcagacacttctacagtcttttcttagccccttaaagacaaagaaatgaaattctgaaagaccttatggccagcacatgagactacactgaaggtcatacaaaagctataaaagtcagtgaaaggctggtctcaggtgtttgagctgccaagtgacagaaatgccccagcctcaggctctcttgtgcttaaggaccaaaggctgtcctttgttaaaagtgtcagctatgtccatttatcttcctacctttgagtctcaacatcctaatcaggcaaaacaaagtaccaaggttttccttatgggatgtccatgaagaattcagcagagtctgaatgcattaggttgaatcatgtgaaactgccacttttatgtgcccagaacagtacaatgtcaccagtttcatctggttcaacctaataggaagccttcaataaatgctttttttttttttagatcctcacttcatcatgaccttctccactagaaaatattgaaacctcaacacactgcctttgggtcatttacagttcaacacaagtgtgtaatgaacaaaacacctctccctggtgtacagacaggagcaggctttagctccaacaccaccttgtaaattccctgccctctgctctctagagatggaggtttgctgtgcatggagccagacccagactcggcaaagcaataaaagctctgtgttctcaggttggaaaattccagagatgagtcttctgtttaatcatgtcatttttttgctctcttccctgaaaattggagtaattgcaaaatgtaaatacacaaaaagtgaaaaaaattggtgattgattgataggaaggaataatgcatcaagctcattatcttcccctggagtagcacacagccagacctgaagctcttctaagcacaggcagggcctgatggaggacatggggccacaagaacagatgggccagtttactgatctgggtggtgccagatgatccattgagtagagggtctgcaaatatctcaagcattgattttaggttttacaatagtgatgttgtccccaggagcaatttgaggaggttcagaatcttgcagcctccagctgcatgactcctaaacaataatttctaatcttgtagctagtctgttagtcctacaaaggcagtctggtccccaggcaagaaggaggtttgttttgggaaagggctgttactgtctttgtttcaaagttaaactacaaactgagttcttcccgaagttagtttctcctgcacccaggaatgaacaatgacagcttgtaggttagaagcaaaatggaatcaggtcagatctctttcactgtcataattttatcagttatgatttttgcaaaggcagtttcactcccatccctcaaccctttctggactctgcccacttcccacaaaccctcttattcctcactaccccacagcctctatcttgtggcctctcctgcctctctaccactacagcctaggtgtcttgggacaattcctctgcagatggatctggaagtgcctgctcactgaccactgattgatcggtcaacgtcacaatatcacataaccctctctggacctctcttttcccagataattggatgttgcctgtctaaaagacctctgagcctgagattctgtcctctgtatctttgctttagcatactcaccacagccacaaggcaggcatggaacattctgggcgtgatgtaggagagcaaggttggggagggcctcaagccgtggcctacacagggcacttctttcgtgaccacgtggccctagcagctggagaccagcctgcttggctccggcaagtattacaggccccacacagattttaaaggcatttctgcctgtcctctctacatacatttccacaaccagtaacagtaataaatctatgccactcctgacagtttacaaagggctttcacatatacatctcatgtgctcttccccacaatctttattgtcaccagtttagcagtgagggtgagggtgcagcacagatgtgaagtgatgtgactaatcggtagcacaacttgaagcggagcacagatggccgattcctaccccagtggcctctccaggatacagcatctccctcctccaagatggtcatcatctcctactccttatgacggggcagctggaagaagagagagtggctgccagggctagggctgatgataggattggtttcactgtggccagagctgagaaggttctgcatacctagagctgcagggacccccaaacaggagagtcctgggatcttaaagccagcattctgctcttcacctgtctcagccccagttaagtgccacttctctctctggtgcttcttcttccaactagggtactctgcttaggagtctgggtctgcctctcccaccctaccaccagcctcccatggagttaactgaattatacctggcccacattagcctctccagccttacctcaagactttgcagctgcaatcatcaccataaatcagcaagtctttccatgtgtttgatcagatttctcaaactgagaatctgattgctccagtctatctcttaaggcggaaccacacaagtcacaggtgtggccagtctagtaattggttgcccgtggctcgatctgtggtggctggagtgggcatggtctggttcagaagtggcccccaggatgcaggaactctgagcagaggactggtccctggacaatgaagggaggaggagtgagcatgcagttaacgcttttgtctgggatgcctcccctgtgtcattatcgggtgatccctgctgacctgtcatggcccagcccaagtgaagcacaaaggcttcactgctttgtgaagccttcagggagaatgagccagtcctctctctaagcttccatacatctctcctcagtttcagatatgtcttcacccccacaaaaatataagatcccaaaagaacagaagtatttttcatctatctttaataactctatatgttaattcaaaatagaagccacaatataactcagtgtttcccaacactgttgtggtgaaaacgtgtcccatgttcaaataggagcaatgaatgttgggtttttaaatgttgcccaaatttctccagtccagggtttctcagagcctttaatttgctaatgtacaatatgaatctccaagagtaaaatagaatatgcagccttcccaaacttattcccacaaaataatcttttcatgaagcaccaaaaacagttcccagaaccagtgtttttgcagaaaacagtttgggagatacacatgtagcagaaattccttagactcaggtgcaggcaagctatagttcaaatttggctctgcaaccttggacaagttgcttaacctctctgggcctgagtgtctttatctgttaaacaaagatgataatacctactcacagggttggtaggaggataaaatgacaaacagtgggtccagtgggacttgctcagtgactgcctgtgagcaggtgctccgtaaatggtcgctgctggtttcttgggactctgtcattactgagtttactctacagcaggtactcaggaggttctggttcagaagcacagcaccactgagaagcctagaaggcccctgagagccaacagaaactgagcaagaccagagccagtggcagctgtctctgtcccacagaggtggggcaggctgactcaggtgctcaggtcaatggaaggatcttcccaggatctccacatctgccagtcccctctccagatccaatggccatagggatcaccaaggggccactagcctttcactggccacaacaaatgtctggtggcccaaggctattctcatgcagcatgcagaataaaataatacagtcacttacaatggcccaattccttcacattcacaagattttctttgtggcttccatcttatcccttcaaccagtcccgatagacctcacatagaatgctctggagttatgtatcaggatagttctaatcccagaaaccctgtaggatagacaggaccgggattatttatgcccattttacacatacataaagtaagacttggaaagactaagccagttgcccaaaccttcaccctgagagcagcagtttatcagccctgcttgctagagatggttcttgctgattatccattgctctccaggctctgagctgcctccctctaccttgagtgggtaacattcctgtttcagtgattcctgccttgtgcaggctgaacttcccagccaggtgtctcctgaccagccctcactgtagccatggtgacaggacccagcaggtcctggttctactcatccagtttggagtcttccccacagtcgcactgtacattgcaggctgctcttccctgagcagggcacatcctaggtttggtgtgtaaaccacatctccatccttcttccagctgacagacatagctcctgcctatgagctgtcacctgtccactctgcacatccttcataccacctgcagggtgctcctccagagctggaaataatgaaaggggaggcctttggccagagcaagctgccctgatttttgcactagagtatttaaaacagcccaggtacagaggatccctgcttcctggaagcggagttgttttgtgtctagatgagcgtctctcttcagccattgccccctaccgccatgccaactgccttagcataatgcactctgatttccccactgtgactagcaatggactattaagccagtgttgccccacgaatctcagcctatgaggcagcaatcacaaacaagcagtttgaaatgactttcccctgatgaggctacaaacaaacagaggccaaaacccagcctgtggcctattgtcaagaacaccagtcagagcagggtcaagaacaaagtggcaggctgcaacacaggccagggaaaccactgcttcccagtaattaggacccagtgagcccatagaataaggcagactctactgtcttccctgagccgatggagagggcgaccctgcaacccctttcagctggagtggggactgagctagtaatgcagccaacattcatcaagacttactctgtgttaggcaccactaagaacttgatggacagtaattcatttgctcttcacaaaggccacatgaagaaggtactcttattatccccgttgtacattcgagaaactgagtcttaggataaaccacttcccaatcttacggagcaagtaggtgatggagccaacagttaaactcagacagcgtgtcgtcagagccactgaaaggtcctgattgaatctgggtccctttaatggagagtactcagtgaacactgataacataatagagcattgaattaggagtccgtccttacgatgggagctgtaaatagcagaatgtgagctgccttcagttctgcctcattccttctatgtgatctgcacaagaaccaaactgacttcatctctacctcacaggactattataaagattgaatttcataacatgtgtcaaagtgtttcttaaactatgatgcttaccatacgagctgtgagcatttgttgctttcctataaacaatcagtgtcctgccctcgtcctgctactcactagctaactgaaatggcccaactgaccttgtgaattggtatttctaagctttggctttttaaacatggaatgacactattgatacaaggccagcttctcacctcgcttcctaccaacctgtttgtccaagttgtagagccttaatgagctgagcccctgggtgccccgaggatgcacaaataccaaatgaacagaaagcatttattattatggtaattgtgctaagataccctctccagagagctgtgagcactttacagacacagttcattcattctcataagcagacccagatggaccaccctgggggacaatctggctgggtcgagtatgccaagtcagcctaggagagatggagcaacttgggctcactagggtaggggcagaatcctacaactcatgcattccacccctgcccagcctgacacagatcatgttgtctctgagaagaagcaactccttcagccctgttgtccttgaagaccagttctcagcctgtatcaagttgatgggaaaggttttaataagacacagcaaacccctacagctgtcccttgcagcaaaaccctcatggcagaggttcttaaggtgtagtcccagaaccagcaccaatgtaatttgcataattaaaaatgcaaattatcaagctctatcctagatctactgaatcggaaactccgggggtgttaagaagcatgactttgatgcatgctaaagtttgagaactactttcttagagtaaatcccagttatagttgcaaaggttatctgtgcctcctgaaaggcactttcttcagatggaaagagctagatcggcagctgcttatttactgagcagtcaatattcccaggctggagagtccccacctaatacatctctatcatttcattttactgcccaagtattccctgcatcttaggagtggatgggaccatacagccagttattttataattaaaaagaagtgaaaggacacagacttcccaaattctttgcttgatgacacaaagttggagctaaatctcccctatgtcctctatgaaagagaccaaggtctcaacggcagactgctcccagcagctcagagtatgagccctgccacttcctgaccattcacaccccaccccatccaaaccaaaggacggcatttagtggtcctgtgcagtgttcctccaagtgctcatggaaatgagttggttcacctcctccatcagcccagtagcccacctggaaaaccagattctaggcagaaagagggtgtcagagtttcagaggaatggccaggatctctctcctcaggcagggccagagaccccactcttagaatgttctaggagaagccctgaactggcagccaggagaccacggttctagttcctctctacctcttaccacccatgtgaccttgagccagttttctcatctataaatgggggtgacagttccatgtcatagagttgttttcagtattaactgaaatcatgtaccttgaactacaaaaaacggagagtgctatgcaaataaagatctttattattctgagtcgctgctctttaaagaagacaagtgaggtcaggaaagcagatggagaccacatctgaccatcgggtaaggatttatgcgtgaaactgtcccactgattggaatgaagacccaggaagcgtgctgcagagtgcatggcagctctggggactgcctggctggtcagctgtccgtgcttcattcttctcctcctcccagttcagagattctgacagatggacccaggaattgcttcctggttcagccagtgaaatggacgcagtgaataatctacagtttacccctgagccagtaaatccaaactcttctgcattgtgtcatgccgggatcacaataaatctggcataagacgggacataaaacatatcggtatttagttgatttgttaatttaactgtcaatggaaatcagatgttgagattcactgtgaaacgaagtagcaatttgtgcctctgtcagaaatatgggtctacagtgtgattcagaaacctcgccccagcctggtgggcatttcggggatgctggtggccctgagagatgccaacagcttggtggcccaggcctgggtaaggtctgtctccccatccccatggctgtccacacttggaccagccctgattctgcaggatgctgtagggagtgggtcaggggtgtgaatgagctgtggatctctgaaaataaagcagactgcattcaattggtaccttcctgtggatctttttttcccctctgaaaatagacgcaatcctcaccctgcctgcttcctggattgattgagagaaactaatgagatagtggacatgaaagggcttggaagagttttgtgaatagaaatacaggtcatgtattggaatagaaacagggtgaattggggtcgtcagaatgtaagcatcagcctaggaaggaaaaagaaggactgactcactcatgcttcttttagagaaatttacttcctttttttgattgtaaaagttatatatgtccattataggacacagaaattcagaaaggtttagaaaagagagctcaaagcattcataatcctctcccttagagataactatggttaacaatttgacatacattccttctagttttcctttctgtgtatataaatggattttgctatgctgttccaacagtcttagatacaggtgcattgggcttgtttggttggctggttggttttctttttagttaatttattatgaaaattttctcatgttaataagggttcttcaaaaacacccttgtgtgacacaggggtacgagcttttattactgtttccctgtctgtggggatgttgtttctttgtttttgctttcatggtattataatctgctatgagtttttttagatctaagcgtctgataactctatttcctcaaggaagtttcctaaaagtggaaccttggggttcaaaggtcttaaatacaaagtttttaaggttcttaaaacatactgccaaacttttctagaaaagttctcccagttcaccttctcaccagcagtatgtaagagtccctaactcactacatccttgctaggactgagtattatttttatttatttatttatttatttatttatttatttatttatttaaattaagacagggtctcacactcagtcacccaggctggattgcagtgctgagatcacaactcactacaggctcgaccttctgaggagaactcccaggctcaggtgatcctcccacctcagcctcccaggtagctaggactacagacgtgtgccaccatgcccagctaatttttttgtatttttagtagagacaaggttttactatgttgcccaggctggtctcaaactcctaggcacaagacatctgcctgcctaggacttccaaagtgctgggattacagatgtgagccactgcgcccggcctgggtattattttcaagtctttgctaatttgatgaagctattttgtgcaaaagctatttcagtttctgccattaaaagtaaaaataatggcaaaaaccaaaatagcttttgcaccaacctaataaaatgtttgaatctgaccatcacttcacacagctcatactaaagtcacacagacaagtcactattccctgagcatggcatcatctgttcctggagttcccttatcttttctcttttgtttagaattcttacccactctttgaggataactcaagtgttatctctttcctagagccttcttttgccccctggctggacactccttctctgtgtgcctatcattcagacatcccagttatctatttctgagcaacaaatactccagagcatagtagcaaaaacaacaaccattttatcatttttcacaattgtgtgggacaagaatttgggcaggtaactttttcatgccacatggcattgacaggtcatgcattggattcagctggcagatcaagaggtgtgtgggctccaggatggctttgcttgcatgtctgctgccttgaaaatgatggcaggagggctgagctcaactgggactatcgccagagtgcctacacctgacctctctagcatggtagccttgagggagtcaaacttcttacatgcatgccccaggctccaaggccagatgtatccatgaccaaggaggacgctgcacagtctttatgatctagcctcaaaagttatgtggtggcttccatcatatgctgttagtccaagcagtcatgagcctgcccgactcatgagaagaataccaaagtctccatctctccatagtcctctcgagaggatttttaaagaatttgcagttaagttttgaaacagccaaaacacacacctattttagcacttattgtatttttattattaattgccaaaatatctgtcctagtatacaggatggcctgaagattgtcatccacattttcctcattgtctactatttattgaatacctactatgtaggagacacttgtgcccctgtcacttggccagtcagtccaagacctgtgggcatgaatgtttcctctaggtgtcctcagagatttttcccatcaagtcttgtctgttttctcaccttttttccctaaatgaaattgtagactctgcttagtagctcttcactctagagaatatagtacctggcagaatccccctggtgtttgagaaagacttgtaaaagtggaaatggagtcctgtgtacctggggacctgccagtctgaagcagccctttgtgccatctgcctgtacttcgtagcaagattgagggctgagaggattctagctgagctgagagtctccccatatgctttccaaattgtcatccacatgtatcaccattaccagaccctcccctaacactttcttcctgcacatggaaactcatctccattgttccctgctgctggctgagaccttgaaccacagcgcagggagaaacatccctcagagctcacctggtccaaccccatcatttcataaataagcggactgaggctgagaggctaatgccaggtttaagatcactcaggtggcctggtgcggtggctcatgcctatcatctcaacactttgggaggctaaagcaggaggattgcttgagcccaggagttcaagatcagactgggcaaaatagggagaccccatctctaaatttttttttttttttttacttagccagatgcagtgacacacacctgtgatccaggctacttgggagactgagatgggaggatcacttgagcccaggaggctgaagctgctgtgagccatgatcgtgccactgcactccagcctggatgacagaatgagaccctgtctcaaaaaaaaaaaaaaaaatttttaaattttaaaaaaaagatcggccaggcacggtggctcatgcctgtaatctcagcccttagggaggccaaggtgggtggatcacgaggtcaggagatcgagaccatcctggctaacatggtgaaaccccatctctactaaaaaaaaataagaaaaattagctgggcatggtggcaggagcctgtagttccagctactcgggaggctgaggcaggagaatggcacgaacccaggaggcagagcttgcagcgggcagagatcgcgccactgcactccagcctgggcaacagagcgagactccatatcaaaaaaaaaaaaaaaaaaaaaaagatcactgagcacacagccgtgtcgggttagctcagaggcttcgtcactgccagggcactgtagttccagctatatccagtgcctcacacaccggtagattccactggaaaccaaacagaaaggggatttaaaagaagaaagagaagagcctgaactctgcatggggcctcagccacaggcttttctcagtaggccacactgacttccccctgtcctacagtcttcattagggcttattttcaaggccaggataatcagtcatctttcaaattgctctaaaatataacataaaatttaccatcttaaccatatctatgtgtgcagttcagtaatgtttaagtatattcaacattactgtgcaaccaattttcagaacttttttaacttcccaaactgaaatttcatacccattaaacagctccctattcctccctctccccagaccctgtaaccaccattctacctgctgtctgtatggatttcactacacaaggtatctcatgtaagtgaaatggcacatttgtctttttgaaactggcttatttcacttagcatagtgtcttcaaggttcatccatatggaagcatgtgttagaatttatttccttttcaaagctgaattgaggaacaactatattgttttccatatcagccacaccattttacattcccaccaacaacacacaagggttcaaatttctctatatctttgccaacactcattattttctatttctatttttttatagtaaccataccaaatcagtcatcttcttgtatatttcggtcatattcattgaaggaatcaagtgaaagataacacattcaaaaaatgcccaatacatagtaggctgaatattattttcgttgttgttatttatccttcctgcctgcctatcatccagttttccttcttcattaggtttctcccaatcttgtggttctgagaagttcagaccctcacatgagaggcttagaaaagaactaaaaactaaaaaatacaaagaggttcttgactcctagccatagcaagtgatcttcatcttttcataggggactctacccgtttccaggtttctttgcctgaactgtacctatcaaatttgataacaccaaaccttcttacatttcctccaaggacaccctgcttcctctcccccctagctggaagaatggcccatccactgcacactgctaggttggagtctgttttgcacttggctttgtgcctagaatgggaagcactttttttttgagagatggagtcttgctctgttgtccaggctggaatgcaaaagcacaatcatagctcactgcagactcaacctcctgcagtgaaggctaaagcgatcctccctccttagccttccaagtagctaatactacaggcacatgccactgggcccagctgggaagcccttgctgactgtctcccagcctctcgctactcactgtgaatcagccatcactctcctccatgtatggtggctcccagcagcccatgccagttgcagtttcatcagcttcccagtccatgacccattgcaggtatgagtgggcagccatcatcctgaatggagttggcagcactgagcaagttctttagacacagagaaggacatgatcactacaaggagccttctacatgatttgctttttatgtgaacaaatgccagctttgtacacacatagccacaggagttggggctatgtggaagtcctctgaaatactaattttatattatgaacaaagcataaaccctgcttctgaatccattacccaaaattatttattaaaaagcattattcacttattctttcaagaaacttttattgtgattcccaggtgctaggtgttgttctaggcactggggattcagcagtgaaacacacgctaagttctccatcccctgagtgctagtcaggcagacagactaccaacaacactaataagaaaggtgtatattgctcagttatacaggtagcaaggaaaggagagacgatgtatctgtgatttggattagaggccaaggcagagattttagataaagccaccagggaaggccttgctgagaaggtaacgtttcagtaaagatggaggtgtggaagcctcttatgggtttatcatgtgtaaatgtcagatggttaatattaaaaatgaaatcttaatcattttctagcactaggtggtttacaaagtactttccaaataaaataacgctcataaagccttgagtacaggacctagaacattgtaagcactcaatcagtggtgagggtggaagctattgctatgatgattgacagtggcatcagcacccggtggctatcttgtctctttagaaagtagccagcccttctactgtggctaccgtggatgtcatgggggcaggatgacctcctgcgtagctttaagagggctgaatccacccggctcccttcattggaggtgtctcaaggggccactacccatgatcaggtgctcctgtctttattcctccagcctgaatgagccctccttccctttgctctcattccaagcagctttctctgctgcagaatctaaagcctggtccctgcagtagtctcagtagtagctataatttgtttatgattagtactagttctccaaggtacagttgaaattgcattgtttactgaacaaacaagaggagaaaatgacatattttacggggaggtatggtgcagaatggttacatgcaacccctttgcagggagattaatggcaaaatagacacagaggtcatttataatattacagatgaaattattggtgtgtgttttcagcaaagcaatgaagataaatgttgaataggaaaaccttaggaaaggatcacacaacaaaataaaggggctatggagactacaaaagaataagaaaatttttaattccttcggagaacccgaccacaaaaatgaaacgcactctgccttcctgcgggtggcctacaggaatcttggcggttctcagtaaatctatacggagactgactttgtcctaggatttggaagttggaaaccagccctcataggctctgtcatgtcagacagccctggtcccaccctagtgccatcctttatgttgtcctctctcaccatcacctcgggccccctgccagtcctatcagggtctccttcgtatccactcacctccctccatctctatgtcaccagcctcattcaagctgcctccgtgacttgcttggtcggttacaacagcagcctgccaagtggtttgcccacttccattttctctccatccattcttccggaatcactcagaatgatctttctaaagacttagatttttttcagtttcttgtctaaactccttaaataaggtccatgctccttgccacggcccacagggtcctgcctggttgggccttggcctccctccgcagccacccctcataaccctctgtgaccatctgtgaccctcttgagacgtactggcctcagctctgcttctagatcaggaacatcctttcacacccccagccttgcagtttccgctcctccacagcctttttcatggctgattctctctcatccttcactatcagctcacatatcacctccacagagaagacacatcacttttttttttttttgagatagagtctcgccctgtcacccaggctggagtgcagtggcgtgatctgagttcactgcaacctccgcctcctgggttcaagctattctcctgcctcagcctcacaagtagctgggactacaggtacatgccaccacatctggctaattattgtatttttagtagagacagggtttcgccatgttggccaggctggtcttgaactccccacctcaggtgatccgcccgcctcagcctcccaaagtgctgggattacaggtgtgagacaccacacctgccatgttgctctttcttcaccactgtcaccccagtgctgggcacattgtagaagctcaaagattgaaatggagactggggaaggtgggtgcaatttctgcagtgcaacccaaaggaatgagtaattcctagcagaatgcaaggaaaccccacctcacgacattcttctactgaaactcggtgatctggtttgtattatttgactacatacattagcacttgctatgtgacaggcactcttgaggagactgaataagtgacatggactccctgcctcaaggaatttagaatttagtgggagaagctggcaatgcagatataaacacacaataaagtgaggcaaggcacagccaaaggtatgcatcagcaccccagagggagatgcgtgtctttcttcaagagagaagagcaagcagttggggaaagtggcatccaaattagcaggaattgttgagatcaagatgattctagacaacggaacaaagttacacaaaggctgtaaggaactgcacatcccgatgtttagctaaagatgtgaagggacatggcagagctgggatttggactgaatgctacagaaaccagcaaaggtttatggtaagattaggaccaaaaaggagctgacctcagaaagctgactctggtggtgaggtgactccagagacaactaatgctgaaaacccatcattgcaagtataatttttcatagctattatttatgttggaaatgactcttgcatttgtttcagttattgttttgctgcaaggatctaacagagccttatctctactgtgtgacatgaggacacccaaaggttctctctgtcccaagatctggcctctgtaaccccctcactgacccccttcccatccaccctccatagctggtcctctcaaagtccttaggatagtctctgaagttagcccataataagaacccatgtattctgttatgtccacatgatttcgtttcatcctcacataaatcttgtacattaggcagcatccccaatttatagaaaactgcaagctatgtcagcattcaccccactagctagtagaagatgggggctggagcctagtattattttctctataccttaggcagctcatcaacacaaactgaacaaagtgggtccttgggcctgcaagagtattcacagacatggaaactaggggcgaaaggcgctcttgagaatactggaccaaggagaaaatccttgcaatgagacggtgggggtggtgagaagtgctggaggtcttggaattcctctgcgaggagaaggaactaaagatccatttctcaggcaccagaggttctcagacttggctgtactcaattatcacccagagagcctgtggcacctgctttttccaagctccccacccagatcctctgattctataggactgaagtcaggcccaggaagctcctgcgtggttctgatataggcgtgtgtggacacaccattaatgcaacagcctaagcccatggcaactatgaatggctggctttagagggtttacaaacaaggaaactgaggcccagagagaaagagacttgttcatggtcccagagggctgatggcaaggctaggcctcaaactaactctcccacttcccggaatcatgatttcttacccagcccaccagcagccatccatagcaagacccgctcctcgctgatttacattttgagtcatagaaacccaagatgccagctctttaatgaggttgtccacactacaactgaggaggcccaaagccctcagcaggactggtctctgccaggcttaatttacacagttctcaggccttctaatacccccattaacgtcagaaaggaatctgcagctgttagtctgtgcactcgactacattctcatcatgtcaccatccattttcatgtcttgaggctgttgagagcctgattttcctagtccagatcatggcccagtcccctagactccagctccagccccaggtttgacctgagtcccctagacaccaggttcccccacgtgtcgtctcccctcactttaattgaagagcaagacccccttctcactgaagcagcactcaaatttcctcctttaacgagtgtcattagttaggcaagagcaagcaggtaggagatggccagaaagctgatagaaatgtgcctttttaaaatgacacataaatcaccctaattaaaaattaagcgccctaaaatgtggcattcgtttaaaaaaagaaatttgcgttaggagagttgtgtaggttttgtagcatcaaatctctaaaacacgattgaaagagcagaggatgcatgggtttctgtttcgaatgcataattagggaagaggcatcattctcagtgagtgaacccaataaatcacctgtggtgtagaacaggaattcatgtaacctgacctgggccacatgtgtctccagtgcaaatctgaactaatttctactatatccagagaggagataaatgggcaaacaaatgtggcctgctgcttcaggagagatgttccaggatgcaagtgacagatgactgagacaggaaatcccactgagaggcaagtttgctgggtgtgtggctttggaaagatgccctggaagggagaaggcttcaggggagagtcattaacaacagccagcattaataaagtcgacactaactctatccaatcaacctcataaacatgcaaccaccaacagctactgcccagaacaggacatcagagaaggaagggaccttcgaggcaggatttgagatcaacagtgaagatagtaaaggtgaagaacccatccctgatacagaggcatctcagcccaagatctccaggcctccaaggaaatgatactcaaccatatgcccctgagaattgcctgaggaacagtttgttgttgttgttgttgtttgtttgtttgttttttgagacagtctcactttgtcaccaggctgtagtgcaatggcatgatctcggctcactgcaacctccgcctcccaggttcaagggatctcctgcctcagccctcccaagtagctgtgattacaggtgtccatgaccacgcccagctaatttttgtatttttagtagagatggggtttcactatgttggtcaggctggtcttgaactcctgaccacaagcaatccacctacctcagcccaccaaagtgctgcgattacaggtgtaagccacggcacccagaaattttaaaaccaccagtgccaagagtctatcctccagagatactgatttcattggcctgaacatcaaaaatattccttacttcccaagtgactcccatgggcagtcagggagcctctcctagaagacaatttaatctgagtcatgggagaggaactcgagctcggatcatctcaccaggtcttgggcccctatctgtggtttactagctgtgagaccacttgcaaagtacccagtaagtcactggttaccttctgtagttctttgttgtctaaaaatcatttctctgtgcattgtgtaggctctcacatcctcagtcttctgattaatcaaatgagcatattactaacggtccttccagtttttatgagattcaaacgaagggtaaagaaaacacattgtaagctattaaaatgctatataaaggtaaccccctgtgatttacattgttagtctgggggaagtgccatttcaaaggctaatatgtaaattcccgtagaaaggaccctcactaataaaagatccccaagcaccgactcttcccagagtggcttgatctcagatctcccttacttttgcctattagggcatttaggtgtttcagtggttaccaggaaccacatgggcagaaggcatcagaagtgtcaatgggaaacaggagctggcttttcacgtctaagccactgcccttcctcgttgctctgcaggctgtggccagccggggcctcaggatactctacaccgcaggccagaacaatcattttataaccacagagaagatgctgtttgggaactcaggcccttgattaaaatcattcaccaaggatacattccttcttggaatttatgggccccataaaaaacagaacttgagaagacagagcgttgttttttgttgtgcctcgttagtttggggcttgggctggcagtagagatcacagtaccaggcgtccatctaattgactcttctgcaagcacaaagctccctgtgggacagagaaggccgtgccagggagcctggaaatctccattcggggaaggagactgggcggagttggtagcagtgctgaaaacgtaggcacctctgggctgctgctgtgcttccacccaggaagacaggtcctggggacaaaatccagggcatcagagagtggaagccacactggctcctgctcctggacctcctcctttgtcaaggtgtgtgggtgaagggcagggatgctgacagcctgaccttccatgcccaccattaccactccttggaggccgcataaagaatagagaacaagggatctaaatcagtgggtttccatcagtctctcagccagccactaaccactcggagctttggtattctcaactatcaaatggacataatgagaccttccccagctaatacacaggatgagttcaattcccaaatagggagaatttagatctttataccagacactgtctgaggctcttgaaggtgagacttgacacctcccccttcaagtcacttgcagctggatgaggaagtcaggcatacaagccatagtaatgatatgtagcagtgtctaccacattaattgtaagaagaagtaatgtacccaagggaaagggacattcatggaggggagaatccatgaaaatggcacagatgaggtggtgagatctagatccccagggccgaaagaggaagagttggtggaaggtgtccccagaggagaggggaagccaaagattccaaaggataacccacatgtgacctactgatcccacatggaacaaactcagtaagcatccatacagaagaggaaatcaccaaggaaaatatgaatagggaggcatcacatgaaaatttcaggctgggtgcagtggctcacacctctaatcccagcacttcaggaggctgaggcaggaggattgcttgagatcaggaattcgagaccagcctgagcaacatggtgaaaccccatctctccaaaaaaaaggcagccaggcatggtgctgcacacctctattcccagctatttaaaaggctgaggtggaagaatcacccgaggtcgggaaggtcaaggctaggacgagccaaggttgcgccatgacgctccaacctaggtgacagagaccctgtctcagaaaatttaaaatgcctgtttatcaaaatacattataaacagaatgaaaatatacataaaatactgggaaaaattgtcacgcatatgataaatagttttgcatccttattaatgacctcatacaactcagtatgaaaacaggaagaacctaatcgatacgttggcaattccctaaaaaataaatttggaaagaaaaaaaagctagtaatgtgagaaaaaattcaacctcgaggctgggcacgatagcttatgcctgtatttgggaggccaaggtgggcggatcacttgaagccaggagttcaagaccagcctggccaacatggcgaaacctcgtctctactaaaaatacaaaaattagccaggcatggtggcaggcacctgtaatcccagctgcctgggaggctgaggcaggagaatcacttcaacccaggaggcggaggttgccgtgagctgagattgcaccacggcactccagcctaggccacagagtgagactctgcctcaaaaaaaaacaaaaaaacaaaaaaacccaacttcactggctatcaaagaaatccaaaataaaacagcagagggatacctttagttaaaaataaaaattctggtaaaactcagggttggccaggaggtagtatgagggatgtgcctgtatgaacacagctggtgaagagtgtaaattggattaacttctagaaagcaatttggcaatctgtattaagagcctttaaaatgtttataccttttgattcagtaattccacttctgggaatctatcctatgaaaataatctgcagtgcaggcaaaggtttacgctcaaagatattcttcaaagcgtcatcataaacagactagcagcccaatcattgaataatgtttaaataaatgatgggacatattgcacaatattgtagccattaaaaaggatttttatgggaaaattttaaaacctttggaaaagcttgtgatacaacctaaattattttaaggcctatatgtatgacacaactatacatacttataaagcatgggcagaagaaactaaaccaaagagaaatctaccaagatgttaaaaatggtggcctctgggtggtgggattctgggcattttctttgtttcttttgaccctgcttttgaacttcagacaattggattctgtttttagaatgaaggaaagtaaaagaagctgtaagacctctttgaggaatgacaggtgattggtgtgtgaaacacccatgcccattgggacataaggtgtggatgaaacagacatagcctagatttgttcaggaggttgagggagacctcatagactttttttttttttttttttttttttttttttttttttttgagatggagtctcactctgtctcctaggctggagtacaatggtgcggtcttggctcactgcaacctccgcctccctggttcaagcggttctcctgcctcagtctccaaagtagctgggactacaggcacgtgccatcacacccggctaattttttgtatttttagtagagacggggtttcaccatgttagcccagatggtcttgatctcctgaccttgtgatctgcccacctcagcctcccaaagtcctgggattacaggtgtgagctaccacgcctggctgatttttaagttcacttatgttttctgtggcagggctgggagtgagggtaataaggtcttaactatatttaatggtctcctgtggtaaggcataagaaaaagtgatttggaaacaaaatcaccaagcaaatgtgagaacttttcttgttatcctaaatacctgtgccttgaaagaggggcaaagaggacactggccttccccattttctcctactaagtagaaagaatagaactccctgtcctggttgttacaagtttagtgagcaagcaggtgctgcttctggggtgctctcgactcctgggacacagccccgtcagctccccaggcaagggggcatcttctcccactgttttagggagaccacaccttccgtgggaccagcaccagtgtgtgcagaaaggcgttttaccttctagcttccaagaggacatgaatgataggtaaagaattgatgcccaaaattaaagctgcaaaatgaatttgacattttacatcctaaaatgagcattgtatctcgttctcctgttccctctgtactttgatcctgtgtgtttgtctgagaatatggcctccatacagtgggggattgattccaggacccccaaatctgcacaggcccagtcagccctgccaaacccaaaaatattgtattttccatccgtgttgggtgagatccatgtataagtgggtccaaacctgtattgttcaagggtaattttttgttgtgcattttcctgcacttagaatctataagttatctggggaaaccttgcttaggctatcttgaggcccaggaacgaatggagtggtgtttttccttctgtgtgagtaagaaaaaggtagagatgaatagtccaggggaccacaaaggtctagtcacaaaaacaaattagagcactgagaagtggatctaaatctactctgggctcccagtgatgggagcctcggctgtctgggatttcagcgggagtcaggtttcgatggagtgttcattctctattgctgctgtaaaaactaccacgaacgtaatagagcaacatgaatttgttcttttacagttctggagggcagaagtatgaaattagtttcactggactaaagtcatgtcaggcaggccaggttcctcctggaggctttaggagaatcgcttccttgacttttccagctttcagaggctgccagcaccctttggcttgtgaccccttcctcccactactccaaacgcttgcttccaccctcatagtcccctacttcttactttgactgtcttgtctggtgatcacattgcccataccccccaaccctagatattccaggttaatatctccagctaaagattcttaatcacagcagcaaagcctcttttaccacataggtaacattttcacgggccccagggattcggatgtgtctatttgggggtctgctattccgcctactgaagataggtaacctaatgtgcaggcattcatgaaccctcctaggggccaggcactggctaggcctggggtgaacgccaagctcacacaacttgatgaagatgatgggattgtgcacaagcgttctggaggcaggttgcatggaagcagcagctccccaaatggaggtggggaggaaggtgtgaggattgtgccaggcagtgtctgtgagctggacctggacggacggcaggatttcaatcagcagagtatggggtgcatcatcacacaaccatcacatgaccatgttcatcgccctctgggagcctgcagcacagagtccatgagcagaggcagagggagaggcaaagcaacttaggcccagatcacagggaccttgaagagcaggtgaaagggctcagatatgattccctggaaggaggtgggatctgttttcccattactagtatttgcagagaatgcccagtaggaggcagggtggacaatgctgggtggccgtgtgctgtcatctgacaaactctgccttatctggactaccctagaaaagagggcacaaggccacctccagcatctccttccgtgagatggagagggcacctttacagtcagagaagctgggtgtgaatcccacataccaggtgtggggcctgagataagtcactgaacctctctgacctcagttttcccacttaggaaatggacatcattaagacctgtctagtttcctcacagggccagatgtgctaaagtagatggagaaattccagaagtaaacaagctgggcttcatgttagtttcagtgctattaggaagagtcctttgaaccaggaaatcatggacttttagatattaaagatcacctaacctggagagtacctcatcagaatcagttgagtttgatttgcagccagagttggaaaggccccacccccatgtgaggctcagagaggctgggggacttagccaagtggggtcctagttcatcttcccccactgccctgagcactgagatgggtttagcaccagctatgaccaggatagagctagaaaacaaggcagagagtaaggcaggctcactcggggtgttgacccaggtgagccctacctgctcatctccacaggggccagagtctccccatctgacatcagccaagaactgagtagcaggaggcaccagccaggccttgtgaggtggtccccaggcaaagccctccatttggtcagggaggctaagccagaccagccttctccttcctgttgtctgaatctctggggcctgcaaagatgtgagtggtcacaggttaattcattatcaaaatgcattgttcttaatccagaaactgataactctgtatgttcattataaactgcccccatcccttccccctctggataaaattaattatctaggaatttcagactagagcaaaccttagcaatctaatagaaatccctcctttgatagaggatgggacaggggccacacagagaagggacatggtcagcctcatacagccaggcaggaggatccaagtccagatctgaggcccaggcttgcatgatggtgttctttgcattccagaacagaaagtgctgcatctttctaatatcttctcaataagtcactccagtggtagaacctggggtcaagaacatgggggacatgcactagaccagatccacctcttggtaccccaaatttgaccttgagggtggagctatctgtgcaggtgagactccacctggaggccatccacttggcacactaaagtcatgggtttgaggacccccgaggaggaatgtcatggagggaacatggaccactctgctgctcaccttcctagaaagtgagataccccagcaggccatggatgagcgtgaggggttttgacccctctccctgctgatgttggccctgggttggccagatggagatgcagatgtctcaatcaggccttggagtgtgaatggcagggcaggataatgctgtccctgcagcctgcccatgggaccaacccatcaggccagctgctgcctggggccatgcaaacttaccatggttgtgtgtctgtgtgctctccaggaacatccccaggctccaagatggccctgcagagctccttcacttgttggaatgggacagtcctccagcttgggcaggcctgtgacttccaccaggactgtgcccagggagaagatgagagccagatgtgccgtgagtagatggggctgccccaccctgcctgagcccagcccatgctcataaccccgttgtccccattatcccaggcatgagagcatggacagccttcctgatatccactgacacttgtgactcctctcatggcaaagccacacagtcttcaagaggcagagctaagatttgtggtctagaaatagcctggtccgtagtcatataagtcaagaaccaaacaagatcttgtaagtgatgctatcagcatcctcaaggcacagagaaaatgtgcaggataaagcccagctctaatgtgacattggaagtcctctatgcccagacttccctcgccttccaagtcccattccccacctgcccctcatcctctccctcctccatgcaccccagctccggctgtatggaaccaccttacagatccttcatgcctccatggctttgctcacatggtctcccctttcctttctcgagtcacatctacttcaagactcgccctgagtcgattctttcagaaagcctccctggccatcccccacaagtaccactggttcttctccctctggatccttcccccacaatccagtggatccatccaaatatcatcattgccattactttttatgaatagttttgagatacaattcacatacaattcacccacttcaagtgtacaattccctgttttccatatagtcacagggttgttcaaccatcatcacaattttattttagaacatttttatcaccccgaaaaggaacctgtagtatctctccccattttgctccaaaccccctgccattagcctgaaccaaccactaatctttgtttctatagatttgcctattctgggcatttagcatcctacgaggggcccactttctccatatctttgccaacacgtcatattatctgtctttttaattttagccatcctagtgggcatgcatccattatgttttatggaggtgatttccatgtctctcttcctctctgtgggtggtttgagtctggtcatctttcccatagcaatacctctcatgattcctggcacagcgtctgtgcttactgactcttcattgatgagaggaaagaatgagttgggaaacttggactccataggggaaaacaaattgccgaggccccactggcagtcggggcggagtagactcccagctggtgctcctgcacttgaacatggtgctccccgcagctgcctctccagaagtaatcaccgcagagcccttgatgtttttgccactgaaaccaccaacgcttccagaatacctacaggcagctggaaaatgtgccagatcctggagcagagatgaataacttggcatcttccctcaaagcactgaaagcttcacacaggggcgggagtgaaatggagcctggactggggaaggaggaggcagaatggtgcctggggtggggcccagacccggagcaaatgcctcacctcccagatatgcagaccccagtggcctgcaaggaagtttccaaaatacgttttaaaacagggccctctgcccccagtcatctggaccctttgtggggggtggagaaggtttcatttattctcatttaaattaagcaataaagacattcattttcccatttttaaaacttcatttctatacaaaactttcaagtgaagttttccaatgataatggaatagttgtatgtttttagataaaactcagcaaagagttacagggaagggctttgcttaccctgttctgttccgctcctggcctttctcgtatagttctcactacacacatggcccaaagtgaagccagtcctgcccacagtgccctgttcaggggcctgtgtgtgtgtctctatttatttgtgtctgcagtgtttccagcagtgcctctgaactctgtgatttcgcgattgcctttttcaagttttttgatacctacttcccagctgggacacaggtcgggcaggccatgccctgattgacaattgggaaaatgaaggcacagataaggcaattgacttgttcagggtcacacagcatgtcagggacagattagagccctgaaccttcaggatccagtccattactatgggctcagggcatttcccaccactccaaagcttaccactactggtttcctggccagctccaagcttcagggcagtctacttcaggcactgagggcaagaacctggggcccagaggctttttcagccacatttgaaaagcggctctgacaagctgtcagagtaacccctccaccctggagaacacccccactgtgttcttggctacagaaagcagttgctgggagggaagttcaattcaggagagttattcccactcagatcttagcaaaactcttagaaaatatcctttttcttatttgtgtgccctatcctttccggcatttttgctgtgttccccatcacactaatgttgactctgaaaaccattcccatgaagataacaacagcaacaacaccagcttacctgttgagcctttactctatgaggcaggagctgttctcaacacttttcatgtaggaacttgcttcatccttacaacatcctgtgtgatgctattgtacccatctttgttagagacaaggaagctgaagctcacggagtttaagtggttgtccacgatcaaactgatagccagaagctgagcagtgattcaggctcagtctgacttcagagccacactcaaaccactgcagggtaaactctgtttcacgagcttccagcacttagctatgataagcactgaacctagccacagacacacccaggatgaaggggccaggaagagacagggaggtccagggccctgctaccgcctttctctgggggcctccccctctgggtctcgggttcctcatctgtaaagtgatgcctactgacactctgaggtctgagaaacaagcaggaagtgtttggagcagctcctggcacaaagtaagtgctcagtaaatgttagccagtattattcatgttattattttcttcagggggatggtttccagaatcaacaccaacatcataggaaaatactcttgactacaccagctctttccaggtggtctggaacctgttaaaatgtttcctctgagcaggtgttcacactgcagctctgttaggaatggccaggtcctctaaagaaccttcctgagggtctttcatcttgggccagggtagttgaccaaaccctgccatggttggaatttggaaggggaaagtaggttgcatttaatcaactccccctaccaaaagccagcctcaactccccacaccttcccagagggagtcctccgcacatgctggggctgcaaacagattatcagactcactctgggcaacgtaactggatctctttggagcccttaaaaattctaacagttgtccaggatgagtggagggcctgagatggaggtgacattcccttgcctttttctagccaatcatgatcctcatatgtccactgtactctctcctccaaacccacactccaacacagtactctcggtcccctctccaatacagccactcctgcatttctaattaaacatcgccaaatccaagtgagacatcccagatgctgtaatgcactgaagggggtcttcgtgactctctctgcgttctgaccaatggcctcgatggcatgtggctccctagaaaggggccagatgttcccatttcatcccctagatgggtcagtgattcactaggtattgcagacagatcacttttcccccatggacttgataatctcatctgtgtgctggggatactcttcctgccaggcaaaaacagtgttttaaaagtgtatttctttattgtaagataaaacatactggttgtaaaatacagaaaatctagaaatgtacacaagagaaaataactatcgcccataatcctccctctcaaacattcagagataactgtaatattttgatgtatttcttctagcatttttcccatgactctatattttcaagaaaatgtatagcacatatttatcaaaaatgttaacagagttgtcacgcaggaaggaaaagaagtagtgtcatttggcctggagtttatacttggcagctcccacagctgctgctgaggtcacagctccatgactgtaccaatttgtctctcttagagtggaatcaggtgtcataattgccaaatgttgcaggattgattgacctacccacagcgcgatttggccatccagccaatgaaataactggctacagcccaagaagggggttggttagaacagtgcttctccagatttaaggtgcacaggagtcactaggggagcctcttaaaaatgcagattctgattcagtgggttggggcaaggcctgagattccacacattttacagattcataggtgatgaggctacagctggtccctggaccacattttgagtggtaaagagttagaggattgagcccactccccttttgttcagcaaataagttttgaagtcttccagtgtgctgactgagtaggagcttggggcgaatgagaagagaaaaggatgatcagaggatgagttgataccattagacccaatcctgcaggccaaccttttgctcagcaattggccttagtggtgatttcccagttgcagcctaatccacaggggtctttgttccgactcttaaccttaacccaccagcttcctcaggagtggcttctggctgagcaagctgccctgatgagtttacaatcatggaaatcctcagctctccttcctcccttaggggttttaattgccacatcaattgtccactggcctgtcttgctcttttgcctgcctcctctcccgttattgagtcagccagaaagaaaaggggtttccactcccagctcaccctggattctatgccaagctgaaacaagaatgggattccagagacagagaatgctgatggctttcttcagtggctttcttctgtccagctgaaaggcataggcagagctatcacatatgcagcctccaacaagcatttccagagagccaggcagggacttgctgtcagtttcagccatactctgaagaactagctccaagttaggtgtgaatggcaattaataacactaccaccactttacatttgcacctctctggctgtttacaaagtgtttccacactctctcccctactttatcctcaaaccagctcagtaaaatagacactaatactgccccattttacagataaggaacctgaggctctaaggaagaagggacttttgtaaggtcacaaagcaggaagtggtgaggctagaactagagcccatatgtccggattccagtgctgttgtgctaacaatacccatgatccaggctcagttctctccctctgcctcctaaaagggtaaggagggagtgacgtactgtgcatctcccacctcaggccggcctcctccttcctccaggaatccatcacccactggaatcttccatcatgggccctggggtgttttgtttgtttgtttttgcttgtttgtttgagatggagttttgctcttgtcgcccaggctggagtgcagtggcacaatcttggctcactgcaacttccacctcctgggttcaagtgattctcctgcctcagcctcccgagtagctgagattacaggcacccaccaccagacccggctaatttctgtatttttagtcaagacagagtctccccatgttggccaggctgttctcaaactcctgacctcaggtgatctgcctgcctcagcctcccaaagtgctgggattgcaggcgtgagccaccgtgccctgtcgggccttggtttttaaaactcacttgtgaaggacactccatgagaaggtcacttccaccagttggtttctgcaagagaagtagatgtgggatcccttgagggggaaataaaaaataaaacagaaagttcttcttagctttgggatttttaatcatagaaacatgtggggcttagggggaaattatttcttcaggggggtataaatgggaagagatgttcaaagtcagtgacagcctgttttaatttataattctgcctctgtgtgaaatgcacagagaatctgggggaaatgagtaataattcactaaggtgctgtcacagccaggaagcgttagggccctctttgtcagcctgctgctgccaagaaggctgagacagaggaaggacatgcagtgctgtgggtctcagctagagagcttctttcctcccacatggagacacaggcttctctgcagctaggctgggaggtgttgggggccatcagaatcgcctggaataggccactagctccttagggctgagtgcctttcctggagccatgctcagagtgagctggagaaagtgagctctctccctcaccctcttatcctttcctcttccttctgtgggcagttgggaaatatacagtctagaaagctgactgtcacctcttcaataggacctgagatcagtctgatgtagagaaaaagatgacgtgccctttgtgctgagcccactgatgatataaagaggccccaatgactgggattgtttgatcaggacaggctagattatgctgcagtaataaaccccatatctcagtggcttgggataacatttacagtacccgtccaatgagggtgtgggtgggaggggcctctgctccacaggatcactcagggacccaggctggcagaggctcctccgtcaatatagtgtcacccttaggaacaagaactttcattggttgtttcagcaagggaacagagagaccaaagatttacacaagggcttttagcagccttaattcagagaagatacatcacttccactcacatttcattggccagagcacatcatatgtcttcacttaactgcaagcgggttgggagagaaaggaaagcaaatggaaagttttgagcaatatgtgtctctgcagacaggtaatttgatggacccagacaaacccccagccaacactaccacaaccaccaccacagtctggacattgtatcaaccattagaaatgtagtgagctatacagtggcttctcctggggtcacattcatggtggctgagtataaagagtgcagaatttagaagcagaagacctgggttcgagtcctaactgggttatctgttagctgtgtgaccttggtcaagttgcttcacatttctgagcctctgctttgtcagatatacaactggactaacaacacccatgctgaagagttatttttcctattttgttttctgtagataagaaaactgtaaaccagcacgggcatcagttagggcttgggggcttctcttcattataatcagtgtcattagtcatccagcattctggctggggagctatattactaatgaagataatttggtcatgcctggctaattcgacttggcattggcatattttgcctttagtggtcctgaaaatgatggtgcctctctgctctctccatagggaaactgcctgtgggtttttactgcaactttgaagatggcttctgtggctggacccaaggcacactgtcaccccacactcctcaatggcaggtcaggaccctaaaggatgcccggttccaggaccaccaaggtactactgctctcctgccttctctctggtgcccatcttcatgcccacatagacagatgggagactcagggctggacttcaccccacctgcagggcaagctcgggtgtctgaccaaagcttgcctagagcgttcacacacaattccctcttcacaccttgggctttcgagtgattaaatctggccaagatagatgtcacctttggttacttaaaataagaaccatgaggagggattaacaaaaagataatagcaacaacgataataatcctttccatcaacaagtatgtgctgagggcgtcctatgtgtcaggcacataattcattgagaggcagggaaagccatagccctctttatgactggggagactgaggcacagcaagtccttgtgtcatttgccccagggttgtgcccagggagcctcaccctatacccggtccatggtccattccctgcagcacagcctctccagccatccccctacctcacccctgatttaagctagtaatgcctgtcctcccctctccggggtccatcctccccacaaaccctgcgtgtctggcagagagcaaagggcctccacgcagccaagagatagccagcccctcctgggtaagctgactccagactcagagacaccaggctgggcaggatgtgggatcacagagggtctatatggccagcagagctcccaacgttaggctgctggagaggccaggctagccagccttgggggctgtccctagtggtgggacccgggcaggccctggtgcccacctctctgcagcatagggctgatggggtgggaaggtctctctccttcttctgtcctcttcatttgccttctttctatggaactagagaccctccaatgcttatttgttgaacagtgagttggctcagtccccactgtgcagcagcatccttcttagcattctgtctgtaaaagacgcagaggagagaaatggagttccaagctggatgtgcccttcatgtctctgttcccagtttgataatttccactacagcacccatagcaaataagcatccagccctgcggaataccgccagtgacagggctcccactgcctcctagagcagacatgctgttgttctcaatcacagattagctttccttacctggaggcaagctccacctctccatgacttctactcatttatcatgccttttgccccctggagccccacagaactgaactaccccctctcccaccaaggcagcccctcagaaatctgaagggaacaattgtgacccgcctgcctgcatgagggcttttctgtccccagtcacacaatgccagctccttgaatctccctcatgcttgctgagatctcttggttactctgcccttgacccacccgaatttgttacttaataacagcctttactgagagaggcagaaaggtagaaaggaaagactaaagtataatgcttggggttctgtggccccctaaagtgttgtgagctcacaatggcactcataccacagcaccggccacgtacaaaatgctctgcagaccctgaaagtttgcagatgcttcttcccaccaccacgtgtggatgggagcccctgttctcccagattttcaggcagagccatgcttagaaaatataagaagtgagtcttcatgggcaggggcacaggacgacctgggttctggacaggggagaagagagtgaaggtcacagaaaccactggaaggccacgcatgactgaaaatggggagggtggagctggggaggccagtgtgcttcaggctagtcctgggccatgggctaaagctggtgaccttggaagatcagggatgtggtagcccagatgatggtgctgggacctcacaggcagtttagaatgaaattgttggccaggcgcagtggctcatgcctgtaatcccagcactttgggaggccgagacgggcagatcaccaggtcaggagatcgagactatcctggctaacacagtgaaaccccgtctctactaaaaatacaaaaaattagccgggcgtggtggcaggcgcctgtgtagtctgccacttgggaggctgaggcaggagaatggcatgaacccgggaggcggagcttgcagtgagccaagatcgcgccactgcactccggtctgagctacagagcaagactctgtctcaaaaaaaaaaaaaaagaaattgttgacaggtgggctttcttctccattgcaggccagaaacctgtttcctcaaagatatccctaggctagataagaactgtgcacagtccattaaccctgcacccctggtcccccagttcctgataatggcgtgcttgtgattcttttcctctctcctagaccatgctctattgctcagtaccactgatgtccccgcttctgaaagtgctacagtgaccagtgctacgtttcctgcaccgatcaagagctctccatgtgaggcaagtctccttgtttctctagttctctaatttctcctcccacctcttgtcacttccggaacccagattaagaaagtagcctagctggctgggctggtcgttctcctggggagagaacaagagggccacctctgccatcttcgaggcagagcatgtccatcaacatggtaaagccctatctacagagaatcatgccttaaacagccatacccagctgcactgaactacttgcagtagaaccatgatttaatcaaacccagaagagattttccatggcataacaagggagagtgacaaggattgcaaaagactttctacagaatcctttttaaaaacattgagctcttgtaatacattgtaaatactatacatcctcaaaaatttgatttacataaatttcactaagacatcaatggcattcagtgaggtacctccaaaactactctctcaaatggttcctgatgctgttatctcattggtgtgggtggagggactggcgccctgttccttagcatacagtcatattctttaggggccaagaaatgtacttaagaccccagcatggtacagtgattaagctcatggactctagaatcaaatttctgagtccaagtcgggttccaccactgattgattgtatagtttgtttgggcagttaattaacctcttggggcttcagtttcctcactgggaaagtgaacacatttatagtgcctatcctgaagagtgaggattaaatagataatgtccaaagggcttggaagagcattgggcacaaagtaagcactgcagtatttagcccacagggtgcctggcacactgtatcaacattcagaaggacactgggggaagaggaagagaacttgagccagaaatcagactgtaagctccaagagagcaggccatgtcttgtgcttctttgtactccctcactgcacctgcatcaacatcttgcgtgtagtagaaaacctacacgtagtttgggtttggccagtcatctcgttctggacactcacaggagaaattcctgtctggctcagtttcaggaatagctatgcaccctctgagcaatttgtttcctgtcaagttgtagacattgtgaaactgaccagattcacttctccttctgtggctaatagaaatcccagggtggtggttctgtggccagcagagggacagacaacaggattgcccctgctaagggatgcaggcagaatcaagcccctcgagtttctcataaaataaaaactcacagacagaaaacaaataagaatggaaaagatgtagaaatgattttttaatccgaggagtggttaaattaaaaccaaggctccacttggcaagcaaatgggactttgtgatatgcaatttgtagcagcttactcctggtttgattttataactcgacattcgccacttccttctcaccctcttctaggctatgctatcctactagattttatgtatctctgtgaaccaccttaaatcctttttggaagaattctgagcacaaataaatagattcattaaattaaattgtgtttgagaaaccatgctatctcatgcagatggtggaattacacagtcattgctgatatttctcaggtgtctgagagcaggtacctagaaaggaaggctttttgagagaacatataaatgaagacagatggttggcccaccggagaggacgggaggatccttaagagcatttggtctttaaatttactcttcgctgggtttaatatgagccaaatttcagaaaaagaaatgtcaaggtacaaatgatattattctaatacttcatcatttctctaataacctttgagttgatcaatagcttaaacaggtgtttcgttttactggcctgttttatttttcctgcagtctaatttgctctgggctgtttctgctattccctgcccttttccagaacttggctcagcaggcataatgaaaggaagggaataagtccattccacactcacattatttatatttatatatattcatatgatttcacattcaggttttcagaccatttgtctaatgctgatgggtctttgaattcccaatgttgggagaaatgtttttatcaggaaaataaataaccaaaatagaaatatgcatttctagatttgtaagccctaccatttattttatgtgaatcctaaatgcagaatgcaggaagttgatttcctcctcccgggcgggctaaaccccagtggcagaaaaaaatggatattgcatttctctgggggactatgtgaggttcactcagggctttcaaaccccaccaaccctacaggggcctctgttgcctatggggcccgagtgcagaaagatggacactaggcagagttttggggacaggactctgatgagcatcaggcctacagggactggcgactggtccagctgagccctgaggctgatgcctaccacgaaggaccttcttcaaacccagctcagtcctggtctccgggaagttaaagtcatcgtacactatctcaagacaccacaatcatcagtggattcccagagaagaactggtgtcatcttcaagaatttcctgcaaagtctagaaagtgagttaaccagtagttctgtgtttcaccagtcacattcacctggaaaatgtaacaaatgccccaccctggacctactgaatgacatcgcgaagagtggggcccagggctctgcatttttaaaccctatccttggtgatttggaggtgcactgaaacttcagagctattggccgtaggtgtgcttgccaattgtgactgaaattcattctgagcccatgcagagagttttcctcctgtctgtggccccaaatagcgtgatgtcacttgtcttttagaaagatgagtcagaaaagggatgagaaatgatggaggcgggggagaagagaagcgggtgggagagcatatgaaaccaggtcaggagccccccatgatggaggcatagccacagtgtgcctttgtgccaatctaacttccagggcattccagaagcctgccccactcccacctcctccctccaggctcctgcagcctgctcttgctgactaccacggctgcctcctatctctctgcacagttacacacggggcatgaatatttaaagacctctgcctcgcccagccacaaacaagaaagaacgctgtggttttggttttctttttgtgttcctcctctccgccacaagctcttctctgcaggaaactggggagccacttacaatatattctgatgttatttttatttttatttttctgagctccagttcaaataattaaagttgccaccggggagggaaggcttgcagtggctttcatgtgctcacttgctgtcagacctgctcgaatccgcctcggctttgagacacccgcggatgtgtctggcattgcagccgctggtaataaagagcacggcagagtggcggctgacaccaccccagccccctgcctttcacacaccccagcagcctgaatgtctcaacaagccccgtgtggtttgaaattctattttatttgaatagcctgcctgtgactagaataatttaaaccacgttctcaggccttctgggcctgcaaggagaaaaagtggactttcctcattttctttcccctccaaggcatggaagcagtttttcttgtgtgagctacagaagtgcaatttgatccaaaaatgagatgggatccccccaatttgtggtggtcagttcctcaatgctggttttcctacctggccagagctgcagttgcgtctcccctcttctcacacatacatatgtacacgcaaacacacacacacatacacacatgcgtgcacacaccctctgggatcttgggacacagccgaacctttccacccctgacgtcacctctagcaataaaaggaatcaggttggattagctgtggggagctgctgtgatctaggcagaaggtgaccagcgggccccttccacgtctacatgggcctggagaaaaggggacccatcctttgtgtcattaaaaccagcaaatgtagcccagagggatgtgagaagacgccatggcccctggagttgaccttggccatccatccctgaagcccttctcaaaggaaggcacccgaaggcagggaatttttctgtaaattgctctctgattgattttgtaagacttttcagggtgctggtgatcatccctggaaacaggcttatccttccctccagcctctcagtgtgacgcagaagcagggaagccgagaggcaggctgtgttgattgggcttattgaagcttgcccccgacctcggcagcaggcaaataggactctgaagatgggaaaaagagaggaacttttctgactgctgtgtttttaaagtttattaaactcagtgacaaaatcttctgtggaaagtcaagaaaaggaggataagagtaagaaaacttagtatcagatggcatgagaccgaggaaaaacaaaagcagaaggggaccttcctttatcagcccccaccaaactctcgacaggagccaaagaagatgagcataactattgaattcaactcgttttccagagcagatcctatgcatcacgggctccccatccagatcatgaaattcacctcaagacccacagctaataaacacaagaccaaacctagatcttatgattctgagtttcatgctcttcctgtcacactgccctgctggagacagatggaaccttctcaacttggggagagttgatgagagcttcaaaagcatcagaactggcattactgtcacctaactcagagccccaccacctcatttctgcaggcagatagagaatcccaccccattgtgtaaacaaagagttctccccttcgtctctccacaggctgggagtagtcactgggtctaactcctgagccaccaaggggacactgccactcacctacaggactcaaatggagtttgttcattgggtgggcctcattctcggccccatgtgatccaacttactttagcaaatcaggaaggagaagccattccaggaggcctcatgggcttgattgcaaataaagttgttatttcctggagccagtttaccttctgcatagaacggatgaccatctagggagaagaatattgcacacttcccctctctgggctgactggtagaagaacaagcaagcccctatcagagcccacctgggaccagcctctctgcccatgcatggccaagcaatgctacactttgtggtgtttgtaaaacccttcttgtaaatagttggggaccagtaccaagctagagggattccagggtaatgttatctctatctccctcactaagcccaagtccctttggtcaggtatttggggaccaagatactcatcaggcagagttcctgtggatgtccaacccccatctcatctgatgctgtgacatctctgcagtgacagaatgtgcctgaattgggagaaagcaagtccagctctaggagtcagtgcttgcctaaattaagagcagatccagctagtctggctggggattgttttcacacatgctgttctctgcacacgcctcttcctgcattggagaccacggtcaggaccccaagctagcatatgatccctctaagttgtccactctctgcccaggaggacataatgttgggcctatcagaaagcacagggctcctctggctcccacagtgtaatgctgatacctagagcaagtcggagcagggtggtggctccaggtagagctgcctccctcctgccccacagcccaacagccacgccatctcctgtgaccagaagaatccagctggccatgtggggccagtgcaaaaggagcatcaccaaggcaacgtggtacagtgggaaggacagggcttgaagtcccttagcccttggaggaagcccccccactttctagcctggagaccttgagtatagcgacccactgttctcggcttcagtatcctctccagggctgtcaggagaaatgagtgagaggagatatgaaacatgcccagcctgaatctagacacaattaggtgcttaaaaatggaacctgtggtttctgctactctgttgtagccattactattattatcttcttatctgactttagtgatgattctgagaccaaggctggagcctgccttctccaaggagcctgaatctggagggtttggcctctgccctgccctgggtagcctggcaatatggcaacacccctctcccaactattgccagtggagaggggtgttgcccagctcagtggctggagtcagaggaagtttatgctttaacagcagccaagggggccctgccacccctgtccaccatctccaccagctcctctccccagccagcatgggcatgggagctccctcctccaatctgccaaaagtccctttgctccactgccccatcagcagacacctacacagaacaataaccccataccttgatatagtcccaacatgtttacagaggggccttcccccacatcgcccccatcccccagagaagatgatattgtcacctttttataaatgagagaaggctcaggagaggaacctagaccacacacagctggccagcaaggcccacagtgtcctccagatgcaagagcatctccactttccccaggggagctcctgggagtgggacagctgccgtcaacgaggtcactcaaggcagggaggaagtctggtgacacggcccagagcagaacgtcataagcctgacttttcttttacaaacccctttttttaacttaaatgtcaattctgtattttattccttaacatacctatttgtttggacacaaaaacatgcctcattatttactattgagtggctaacactccaggaagctacaccctgtttgccctgtggctttgggtacccctaggaagagctgagcagcatatgtgcccctactctaagaaacccagaggaagagctcccaccctcactgccgttttcggaagccccaaggcctccccacctttaggatctcactccatcccctaggtcacaattaggctcatagatggtgcattttgaagagcacctgctctgccttggttggccctgaagtcagcttcaactatggttgcccctcatctaccccatgagtcaccctcaccctggtgctgaaacctcaggagggctgagccctggcagctgctaacactgctggtgatggagacagtaacctcagaaagcctttagctggggtctaggcatccgcaactttgtgttagagggcaagggcctctaatacaaaggaggaagctgcagtggttctcgaggcattttccaaatggctttttccaaaggctctctacatgagtaagagatttgggccccacttccagtctctaatgacaaccgtccagacacctgtaataacatcactgtaatgagaatcccctgtgtgtcaaagcttacagagtctctccacctcccacggctaccctgtgagtggataaaatcttccctgttctgatgagcccctgagccatggcaacaaggcacttgactggctggatgcacacacggaccccgagcaagagggatgagcgagggagggacactgagggtccacagttaggtggtgaaccagcaagtattgatttcaaacctgccgtgtggccagccatgcggggagatagcccacaggaatctgggatctctttggggtgtttattctacagaaaagttaagaacacttacattcagtgtgaaaacttctggtcttcaggtcacttacaaatcacttggctgtattatgctgaaaagcaagccattattcttaatgagggccttcgaacaccctagctctttgcaccctagtagaaagaagccttcacttagtccagtgctggaggaagggacccttagtatcgataaagccaactaaggatgtagttttcaaatattgattccctagtataaggctggcactatgctaagcatttcacctacattatctcgttataaaaaattattacccccatttattgatacagaaactggagcttaaagagtttaagtgactgcccaaagtcaccctgctagaggcagagtcatgattcaaaccaggtctgcccaactccccaaccaaatctataaatactcgatttgatttagatggcctgagtttagatcccagctctgccccactgaggagccatatgacctcaagcaagtgacttcctttaatttgagaaaacaacaacaacaaaaaacctgttttagttgctgcatgaggttgttaccaggatcagaggaaaatgtgaaaagcctttgtcttctctgcaaagcttgatgaatggcagcaattattattattatgatccctcatcttacgttactcaggcatgaggaagttgctgctgcataaattcagccactgcttgtgttctgatttctcctctcagtcaatcagcaacacgtgggcaggtcgggagcgttatttcacacagtgtccacattagcaccagcaggacatgcccaataaacccacttcgttgataattaactaattaattgtgcagccccacccccaccccccacggttgcaagcataaccctcttccaggatgagagtgaacaagaagactcctcaatgagtctcgaggacccaacaaatgacaccttcctgagctttctgagccaaagtcattcttaccccagcacctagagctaggaagccactggagcccagcattctatcaccactgcctgttaagtggtcgactctgccagagcacttgctaatgcctgcagtaatcaacagcaattgtaactgcagtcagacataattaatgtaatacctttgagccattcacaactaatacctctcccattgcatgatgaagctgaggtctaggaagaatcactgtctcagcccctgggtgtgaataggatcttccttggcacttggcacagacttggttcccattcaaaagctgtatgttaatcacagacctctctggctcccactagtggtcattgcaacacattcatgtcacccatatatgggggaacaccccattgagagcacacactccctccagctatcagggaaaaatactccccagagggctctgggccccctgcagatgctcctgtgccccacatctactttttccagtggtgtccgtgaaggctgtgggagtttcattgcctagaatcatcctgttccccagcagtcagattacaaagctactcctcagtgtcatctccatcatacacagagaaactgagacacagaggaggccgtttgcccaggatcacaccatgacagtgtgactgaagaaaataccatctttttcttcccataagcctggaaagataattctctagggaacccagaagattaaaaaacagcaacaaaaaaaaaaaccagacagaaactttaacacagcattttcaccctgtcgtagtctgttttttgtgaactgtttatctctaacaaagtgtcccctgcctgctcttttccatgcaggagaaaggaactaacatttatcaaatgtcttcgctaagctgggcactggtctcatataatcttattaaagccccataataaatatctaagcagggtactgttgaccccacttgacggaagaagatgctgaagctctgagatattacgtgatacgtaaaaaatagaccattctttctgatacgaaagcttgcgttccgttcacagcacggtcccaccgcattccacagaagctcccaccttcccttgatctccctcacaaagcctagagtacaggcacaataacttgattctccctgaagtgggtaaaaacatagtactagcttttactgttttccaacatcagaatcctctctcaccacctttttaatatagcatttattgctttctctgattataaaagaactttatgttcattgtagaacattaggaaaaatgcaggaaagtatgaagaagaaaattgaaattgcccaaaatcttaccccccaaagatattggtacatttccttccagacagatagatttagatttgagctttgctatagagaaagggtttatataaatataaacatcctgtgtcttatttcttatttaacattacattttcccatatcaatattagtcttcataaacatgcttttaacagctgcacactctaaattaatttcattgtttttgttctagttatcaaaagtcagatattcattgtaaaaaaaaaaattggaaaagaaagaaaagaccacagaagaaaaaaaaaaaacttgtaactttataacctcaccagccagagatctcaaggtgattatttttgtatgtggccttcatgtttttagaaagagggcatatgaatgtccactggtgttccctggcttctacataatccctcagaaaagaaacattaagtggtattttcaggaaggatcctgatcttttaagtatcctgcaagaccaggaatccagcatttcttaagcctccataattgcaagcatttgccagaaacgtgttttatttccttgttatcaaaaatctgcatctggccagcttcttgctgtgctgggttgatttgtcattaggctatttatagctagagagttggtgtttcatttttccaggtgaactagaagatggtgaacaaaaacactggattttgcagtgagtcagtattctcagctgaagttaagaagataccacactgaaaccagggaagtcaaaattaccggttcacactgagaattacaaccctctggcaccctatattgagggagagccttaacccccatacagagatgttcctgatgacaattccaatcccagtcattcaacagagactggatggggaatacccagggagtacccccaccatgcaagctcatctttgagcatctctgttaaaaatgtgtttccttctcttgaagtgaaatacacactacagcatctagccttggttttgtctctactattggaattcatgcaggtcttcagaaatttgaagaaagatagcacctgccccgtcagaacatttcctacatttaggggtgttgcatgcagaatagatattatttgatgtcactgagtctcttttgatcactgcaggcttttgaacacacagtattttctgtgggttgaagggattgtcctgaagctgccacgaggtatgcatagcaaacatggggcatattcaagacataaaattgcaataattacctctggaggaggaatgggccatgagagaaataatagcattaggcctagccacaatgccgttccggctttacatacaggactttaattaataaaatgacaaacactggtaccacataattggaaagtctatcagtcccttccgagaggcaggaaaaaatggcccttgtgaaagcgctggctggaaccagaagatataattgctggtggcgtactcctggtgttgtctctactcacttgtctcatttgctgtctgcatataaaagagtttattagtcaaacactgccatttataacctatatctactaggatgtgtctagaaggatcaaaaattttattgttactggcatcagcaagcgttatttcccataaatataatttagaatttgtgtcagatttcgcatatttgtgtgaatacacacacaaacacacacacacacacacgactgttaattgtctggtaaggacaatggttgtaaatgcattaaaattcactagctccctaatttctccagcacgaaagtatttctaggataagatcttgttaaaatataaattctgattcagaagagctggggcaggccctgagaccctgaatttctaataagctcccaggtagcgcccacattgctgatccaaagaccacacactgagcaacaaagatctggaaaatctttgcaatatgcccccaaagctttaaggagtaccataatatattacatgggcattgcactccatgtatggtagaaagaacacagagcatagtgtggactccaggtctgcagcctgtgggcttagtgcccaggggtgactgacttaacgtctctaagccttcaattctgcatctgaaaaatgggtggaataatatctacacaaagggatgttgtcagtatacagtgagataagcctacgtgcaagcgcctagttcagcttcctggcattcagtaaagagtcaattaacaaatgacttcatatccagtaggccaggggtccccaacccccaggccaccgaccagtactgctctgtggcctattaggaaccaggccacacagcaggaggtgagtggcaggcaagtgagcaaaacttcatctgtatttacacccactcgccatccctcgcgttactgccagagctctgcctcctgtcagatcagcagtggcactagattctcatagaagtgcgagccctattgcactgatctgacattatggtgagttgtataattattccattatttattacaatgtaataataatagaaataaagtgcacgatatatgtaatgtgcttgaatcatcctgaaactaccccccaacccccagcccctggtctgtggaaaagttgtcttccacgaaactggtctctggtgtcagaaaggttgaggacctctgctgtaggccacccagatagaaataggtcttaagatggaattctaagggtgtttttggaccagaaccttgactgccaagatcaagctgggtatacttggcatgggtatttacataaaatgatatcaagggacctctaaccaaggactgtgtaagggaaatgaaggtctttgagagggacttgagcctgcagtctgctctaggaaccacatacagtgagtgctgtctaatgttagacacatgtgatcaacaaggaatactcagtaagaactgataccaggcctccaggtcttctaattaagaaattggtaaaaaccttatctgcaggtccaagagggtagttctagccccgtatacatcctcgggtcattactgctcacggggtctctctctctttttctctctctcggttattctcagtctttttctagaggcgatgtaacagccccaagaaggcccttagctgacggcagcagactccccgctgcaggaaaatcgccccctctacaccttggtgatggtgggcacattttaagccatttgtaagttattaagaattgcctcttactcaaagtccaagatgaaaatggacccctcactgagagggtcaggcacttcctgcactaagtaacccagctccccagaggtctctacccaggctgcactttagaaacacgtggagaaattttaaaatctgccgatgcccaggacctacccacatctacttaaatcagagtctctggagtggtgcccagacattagtcgtctggaaagctgattctaatttgcaccccaggttgaaaaccactggtttcaccatgtcattcacaatatcacaggagctctacttccacattcttcatctcatacttcataatccccttttgaggcaggcagggaaggggtggtggttattatcacaagtttgtctataacaaaatacaggttcagaggaggtaagtggttggcttaaggtcacacagttaatacacattggccttgaagcacagactccaaattatgccatagtcagcagacaagaaaagaggatggtttgacaagccactgaagaatgaatgttgatgcaaagggcaggtggttccagtgcattctggaaaggtcatgggatgagtcacaggagcacagggacagggatttggcatcaggccagagattctgcatttcttttttcttttcttttttttttttttttttagacacagtcttgctctattgcccaggctggagtgcagtggcaccatctcagctcactacaacctccgcctcccaggttcaagtgatttcctgcctcagcctcctgagtagctgggactacaggcacctgccaccacacctggctaatttttgtacttttagtagagacagggtttcaccatattgaccaggctggtctagaactcctgaccttgtgatctgcccacctcagcctcccaaagtgctgggattacaggcacaagccaccgcgcccagccagattctgcatttctaacaaggtcccaggtaacactgatgctaccagtctgaggaccacactctaagcaggaaaccactgactggctcttagaggcacaatgtggaagaaactacgattataactacaggtgagaagtaggccaagggacagacataggctctggactgcttgtatcttttttttcctagattcaggggataaacatgcaggtttgttacgttatgcaatagcataatgctggggtttgggcatctattgcacccatcacccaaatagtgagtttactacccagtaggtagtttttcgtccttttccccctactctcccaccttttagagtccccagtatctattgttttcttctttaagtccatgtggactcattgtttagcccccactcataagtgagcacatacggtatttgattttctgtttctacattaactcacttaagataatggcctccagctgcatccacgttgctgcaaaggacatgacttctttcttttttatggctctgtagtattccatggtatatatgtaccacattttctttatccgatgcaccattgagggacacgtaggttgattctatgactttgctattgtgaatcgtgctgcggtaaacatgtgactgcaggtgtctttatggtaaaatgatttattttcctttgggtggacacccagtggtgagatttctgagttgaatggtagttctgtttttagttctttgagaaatctccatactgttttccacagcaactgaactaatttacattccaaccaacagtgtgtaagcattctcttttctatgtatcttcaccaagatcttttctttttttaccttttaataatagccattctgactggtgtgagatggtatctcattggttttgatttgcatttctctggtggttagcgttgttgagcagtttttcatatgtgtattggctggttgtatgtcttcttttgagaagtgtctattaatgtcctttgcccagacaaagggcaaaggtgttatttttaatgaagttatttggttttttcttgatttgtttaagttccttataggttctggatattaatcccttcttggatgcatagtttgcaaatattttctcccattctgtaggctgttataaactctgtttatagtttcttttgttgtgcagaagctctttagttaggtccccattgtcaatttttgtttttgttgcatttgcttttatggtcttagtcataaattctttgcctaggccaatgtccaaaagagttattcctaggttttcttctaggatttttatagtttgatgtcttacatttcagtctttaatacatcttgaattaatttttgtatatggcgagaggtgggatccagtttcattcttctgcctatggctagccagtggactgcttatatcctgaggaagaacatctgcctggatatactcccttactgaacactcagtggatgaaaaaaaatggccaaaaaatacacatttgctagccattcactgactgccagtttgcaatcttattccaggccttttgcatctatttctagaatgagacattgttgaaactcagagagtgcatgccttggcttgagttgtggctgtagttgagtgtcttctgctataaacataggaggtatcattataagatgaaagaaggttaattctttttttttctctttgagacgaagtcttgctcttgtcccccaggctggagtgcaatgatgcaatctcggctcactgcaacctccgcctcccgggttgaagcaattctcctgcctcagcctcccaagtagctgggattacaggtgcctgccaccacacccagctaatttttgtattttcagtagaggcagggtttcaccatattggccaggctgatctcgaactcctgacctcaggtgatccacctgcctcggcctcccaaagtgctgggattacaggcgtgagccaccgcacccggccggaagttaattatttaattctcctatttgttcctagctctgaacagttgggtccagtggctgtctggacctaagtctttactgtgtgatgtcatgtgtcttgcctcgattatcttgtgtcatatgtcctgactgtcaagtggctccaattacttcaccttttgctacaatcagaacatttgtaatcattcatttaaattctatcttcctggctggatgataagctccatgagggcaggagctcatcttcaagaacagagtatgcagcaaagagtaggagtgcagtaactatctgcgagtgagtagatgatgatctcccttaaggactaatcccaggaaggatcctggtggattgcctcagaaggctaaggatgccatagccttcacaccatccctgggtggccagtccagttctctctcttttgcccggcctgattggcctaaaacacagaacaggaagatggagagagctcagctgctggctggcccctggtcccagaatagacaagacagggctgcatcttgctgacatgctcataccatcagcagactctactttaaactgtaaagttccagggagcagctgaggagggggcagtttagaatatagccaagtggctggaaagtgaggaacttctccccttccctggtccctgacccatagaatgtaagaaagtgccaaggagcttcctaggatggaaagttgattgactacctctaagaggaaagcctggcaaagatgagagtgtctccctatatagatatgcaattttattcatgctgacattgattggttcctacaacgtgcccttgcttgacagccactgtgaacataagatgaataagacagtccctgccttgaaggaattcatgaccaagggtagagagagaagacaaggcagcaggtcccaataaccttagaagatttaagaggaggaggaagtggtttctgagatggatgaaaagaaaaaggcctcctgaaaaggaaagagatctcattttttaagaagacagaaggaaaaagcaggtagagaaaacaaaagaataaaaagtatagaagcagagaaatgcaagtcaggtgcaaatctggcaagtagactggtgtaggggagtctggaacccgcattcattcagcttccttgtgtggattgctaggtgaaaactgacagactacttctctggtcactggaaggtaatgcagacagttcttcagtcacttaaaaatgcaaaacacaggctttttagtaatcagcatgctcatccagtcacaatttcaatcttgctttaaagtcatcacttcttgccctctcctgccgcctccaaacttggtcctattgcagatggaaagcctgaaatgagagaaagggtgtggtcagtggcctctctagttctccacccaacctctcctcctcttctgtcatcttgttgacttctgacttgttggggttgtaagcatagacacagaaaggatttcaggggagcaagaaagttcttattggagactgttgggtaatcttgcattggtgttctctggatgtaacaaatgtccaaggcttactgtttctcacacaggggcttttggggttcctttgtagatccacctttctcctcatcccctccaccatggcttagaatttttcgccttgacttagggcacatgcattttttttttttttttttttgagacagagtcttgctctgtcacccaggctagagtgcaatggcacaatctcggctcactgcaacctctgcctcccaggttcaagggattctcctgcctcagcctcagcctcctgagtagctgggactacaggtacctgccaccacacctggctaatttttgtatttttagtagagtcggggtttcaccatgtttgccaggctggtctcaaacttctgacctcaagtgatccacctgactcggcctcccagagtggtgggattacaggtgtgagccaccgtgcccggccaggtatgtgcatctctattataggtggtcacttccaccttcctccactcttgggcatctcaagataccggcagcttcttcctactattgtctatttacctccctcttaggcaagatctacagtgaccctgcatgggctcccctatacatggttctcctcccacccatatgcaacactcatgcatttctgccccagcaaactctgggagtgtaggccacccgatgctgccaccttgccttgttctgccatcagagcagctagccagcccctagttcaaactttagaccttccaggtaggagacagacactaatccaccgtgtttccaaaactgcaggggtaagtatcaagtccttgatatggtatcataaaaccattctctcttgacttgagatgaagatggaacacccttcccaccttcttcttagcaggagagtgaaatggaactcgtggtatgccaaaagcaccttccaaaaactctctcctaatagtcaacctccagcattttgtaatatgcaaagtatgagtgaagggttaagaattatgtcattcatttttatccacctctcttgaaagttctgcaaccttgtgctcttacacttccctttgaaatgcagcacccactgcctccatgcttcagccaaaatgcctttttaatattttgttacatcaattattatttcagttaacagtccctataaccctataagagataaaactattctcatcttagagaataggaaactgagcttcaaaatgattaaataactaggccaaagtggtaaaaacaggttttgaattcagaactctctgattctagaggtcttagaccattctgaaatggagaattcatgtgacccagcataagtgcttaacaaatatttgttgaatgatgaaaaagttgatttcctcagataatagaggaatgtaaatgccataatttttgacagggcatgagaaaccatcgacagttgttgagcccaagtcacagatgagcatgatcaacaggagaatgtgatagaaatatacaagagaattcggaagagagaaagagtggagagggagaggcactttaggagactctgaagagttcaaagagttataaaggacatgggtactctattttgctagagtaatgaggagattatctagaaaccaggttgaaagaacttaaagagagaatgagcaacaagtaactagcggcagcagttacatcccagctgttcaagatgtgagcatctgaatggggcaaagaaatggttacaagccagaggagcccagaggatgaaataaaggatatttctccagaatgggtgaaccttgatcttatttgtagacaaaggagccaaaagattgactctgagatgctggggaaaggagggaaaggagggcagtaactaaaagagcaaggactgggggagagaaaatgagctgggctaacgtggaagacagtgaaggatgcagcttcctctaagagagaaaaggaaaagaaaggaggataaataaacactgggcccacaaaaaagagagaaggggactgaaggagattgttcctgacatagtagatcttctcagtaaagtagaaatcaaatcagtggattaggaggtgggaaccagggggtgagagtgtcagtatgcgagggagagtttgaaacacccattgtactatgtgtgtctggaaatcaactgtggaaatcaagagagaatgaacaagtaccacctcacatccagggcattgagactcaacagtctgaattcatggaagttcaaattagcagtattcttcagccaaggagcaaaaggagaaagcatcgtgatcccaagctaggcactgcatggcatgggctgagagctgaaagggtttacagttagcaggggtagagttgaaatttccaatcatggcttgtacaagaaagctaagtgaggccagaaaaaaaaattaacagattcattcatttatcctaggaggtctcagtagagatgcatatttgctacccaggatatggagaaatgggaaaggtgtaagtgaagtgtctgtggttatagaccaggcttacaaggtccagggactcagaagtaaatcagtccctgggggccccaatgccctggtgtgaccttattagtgaagggtttgtatgcaagaaagtgggaagtttggggctgccgtgagtcatggttcttaacctcttcaatcaaattgtgaggcaaccatgtatcaaggactggaagacaaaggagtggtaatttacaaagaagcaggtattcagagagaatcagtaaaaagggggtacctttactctgacgaaactgccagtttaccataagacatattttacctttctttctacaataaccaccattttttcttacaggattattttaggcaatgatatgatatagttgtcctaggtttttaaacacaaagaccagaaaccttgtttatagtatgtcctacctctgaatatgatcgtacttaaactttcttacaaaggttattagttacaattttctttcaaatgtttaggaacaatgccacagaaacttttaataaagacacaatgaaaaacacagttgtaacttccttttggcgaagtgggcatcctcttcgaaagatgcccatattaaaagatcttgatatgtagatttttgtctggcctttgcctgccagtggccacaggtgtcaagtcattgggtctttagttagctgacatgtgacatgacaccattcaaatgagattattagagtctttggggaagagagaaaaatctatgatacctaaatcactaaaagaaactgagtcacaaaatcatttgtccaaggtcacaaagtaaattggggccacaggcaagaatctttggctactctttaggaagttcatttactaccccattgatcttgatatcaccttacaggcagaatcttgtgaaaggtaggatgataacatcaacctgaacaaagttccaaaactgcccatcagttgtccctgcccaagaaaaaaaattaacagattcgttcagttatcctaggaaatgggatacttgaacttcactgaaagcctcttggtgagacaggtggtgggcatccagctcttctcaccaggctgaactcagctgagtctcttataaggtccttgaaacttcagtggagaattccagaaaggggacctttcagcaatcataccttgtcctctgactcttctcgccctcacagctccgaatgtcctggctcattcgtggagtcttgaggggaaacgtgtccttggtgctagtggagaacaaaaccgggaaggagcaaggcaggatggtctggcatgtcgccgcctatgaaggcttgagcctgtggcagtggatggtgttgcctctcctcgatgtgtctgacaggtaggctctatgcatctcccccaatacccttctcctctatcagctaaaatgaaaaagaaatcatgccttccctttccccgtgccttttacccaagacacacatgcagatgtgcccacacaccgatatgtgcgcgtgcacgcacgtgcacacacacacacacacactctgcaggttacacactttctgcagtttacaagcttctccaagggatgaagaggctactgaacacttgtctcgggaccactggtatggcctggttggctacccccagtgtctggaggaaaaataaaattgaacaactcacatttcccccaaataacagtttggttttacatgtatatagcatgttctcttatatgatagactttgccttactttccccacttttattttatccttattaacaagaaaacctgcaaggtaggtaggacaggccttatcatcatttaccactcctgtcctgttataaggggagaaacagaatcaaaacggtgaagtgccagcaagttggaatcggaattgggactggtgcccaggcccgactccgagtccagtgttctctgttgagtcaggtcctgaggcaggttgataaagaggatggcaaattcttcagtaaacagaggaatgcttctacttgtggtcttagttcctatttgggctctatcactaatggcctctgtgactttgagcaacatccttgacttctttgggcctcagtttcctcacctttaagctgagaggtttgaactagaaaatcattaactccacgtggctctgcaatggagcaggaaccatggagtgttcactgccacttgtctcccaggatggcactattctgccacctgcagtcagcctggagcaagccgtacttgaataaagatggccctgcatggcagcactcatgtgaccctgccgtatcatcctgaaccctcatggtgggtgctgatctgttccagacaaaagaggggcgaggggccatttctataaaggggacagataaatggatctggatgggggacagccatcttttatgggctaaaagtcaacccttacaacccacagcagcctctgcctgagactcctaaaacacaatcaaattaccatcctggtggatccaccttcaaaaaatgaggacagagggctcaaggcaaggtggagggtgatgctagttggcatgcagctttataagtgtaaagctggtttcacatttttcgcccaaaccccacagtctgctatgtccaagagctcataactgcatcagtgctgtcaaaggacaaaggcattgtcctcactctgagcactagctacccactccttcagatgtgtgtgggttaacgatcaaagcccaaggacattccaaggatcagtgaccccaggacaaatggatttaagtggagaaaggaggaagtgtgagctctgcccactatagtttagtcttttgtctttggggattgtggagctgcatgcagttggtggagaacaggagggtggtgaaagaatcctccctcctgggagaggtgaaattaattcagatgaatcaaagtgttttttttctcctcaatccagcaagtcttctctctttcatagctactccaggggatttaaagtaagatgttgactcggttcactctcatcctctagagtttcatttgaaggagacttcgttctcagcctccttcttccctgttaaaggctgtttaccagactaacatttccagtattgatactgagaccaaactgtccagtggggattccgacaaaagacagcttggtttgatgatgccttgtgacctaataagtgtacaattacagaaaacaagagtgcttccattcgctgggagcctgcataccactgacatgctctgaggttggaagctgccctcccagaggtacagatgatatgggaagcatcaagatccagaggcaaatggtactgaaggaaaatgaagtgcagcagttttcattcgctaaaatcaaactagactgtagatgtgactggccccaaagaaaccaaagaagcactctagatgaaagggcagaggctttggaatcaaatagtgccaagtttgaaaactgccatggtcacttactagttgtgtgacctcagccaattacttaagctctctgagcctcagtgtcctcatcagtaaaatgagaataataacagtataatttcacaagattgttatgagactaaatgaaatgactattgaaagagtctacacagagtattaatagattttattttctgcatctttcagttatttggcctcagtaataatttattaaacaaatagcacaaatcacaaccactgatcttccaagtcaagccatgttctataaaacagacaacacagtctcctcttaggtttggagaagtaaagtgcttgtttaactgcctgatccacactaaatgctcaactactaataactatagtataataatgacaatatctccccacctaatggctcagaagggtctgggatggccaatttagcaatataaccagtcatccaacccttagataaaggcgggcttcttatgaatttgttttcacaatgctctgttgactccttatgagaagtcactgatggaggagcaaaaagcattctcttccctcttccttcagggagagtcagctatagctgcccagattgctagaagatgaaaatgggagaaaggagaaggtagaggaagacataagcaaggaaaatagaaaaataggatggataaaagacaaagaaaaaccaactctcttcctcccacctctgaggtaggcggtaacacctggcgccacctgccccacatcccatgaagcttccttaggcagctcctggcttcagctattcagcacctactttgtggacagctccccaaccctgaaccttgaaagcggcagaaattttattccctatgctgtcccaaatcacctctgctcccaggttcctcaaccttcacacattacaaaatttttaaagtaactttattagggcttagaggttagcacttaagagactccaggctctagtcaacggtattggaaatctgaccattttcctattttggaaatccttctgtggcttcctgtggctttggggatgcctttaaaactccctaataagaccttttttaagcccatgtgtgatctgtccagcgctagtttcaccagctgcttcttaaaccattctttctctctcaatctccccttccttccactcagttgtaccatgctacattcttacttctaggcttttgcagttgccatgttaaaggcatgttaaagttaaaggaagaacttaatgttctgcctttactttccatctctctaaatactactcttccttcacttaaaaaaaattatccccagacacctatactctatatgtacccacaatatattctcatggctcttgaaacatccctataataatttatcactctttattatcttttttatatctgaatatacaaactaacaaggtagggattgtgtgtgtcttataaatcactgcttcctgaatctttagtaccatacttaacatgtagtatgcccaataaatatgcattgacagaatgatgtattgagggaaattgcatatactttcaaattccagttgaataaactgagaatttcacttgatggaatctatctaacattcctcctctcttcaacctgtgtccgacaaaacagatatgattgctttataataaatactactgcaaagtgttctgtatatcagagcaacacctgtgtcccatcagatgaaccaaaacagcatttgttactctgtgacaaggaattatctttagggacttgcctggtacctgtgctttctttgtctctggtcacattcctgttggaatcacttcataagaaagactttgatcctaattgggtgccctggtccttgtgatagagagaactagagttgtgcacttgagagaaaagggctctagtcagattgcccccaccacacagtagtcctcgggaaggctcggtgaataagtcataggtacataaagcctggtgacagggaggcattgatccatggaatgatatttcttctgtccacttacaaacatgtaaagcgatagaaggaatgtaatagtctgtcatcattacagaattatgttaactgtacaaccatagtataatgagtaacaggaaaaatctctaagagcaatgcctaagatgttttgagcagtggcaatgtcctctgaatacagataaatgctctcaaggtaattttgaaggacaacaccaattcaaatatcagcttgatgtgtgcttaaaaattatctcattactttacatccacctcacatagctacttttcctcatcctctccccactttatcagccccacctccctcattcaattgctgctctttctgctggaattaattctaccttttctcaaaatagaagaaaggcaagttctctctcctgattctaattgtcagtctcttgcagagatatacccctagtttttcctctctctatatatcttactaaattaaacacaatgttcccacactatcctaagctttgacacgcttacagagcagaagccatgctaagttcaactcgttatgagatggatttggaaacaccatggatcaaatcatgtcccacaaatcactgcaattgtacagtcaaatataaagtacacaacttatcacacctgtgcaggctccattcctcagcactatcattataaaggcttttagccgtacactacatacatagtctaacaagaaaaattgttccttctggagatatttagatttcctgttccctttgcaatcctttgtcctaaacgacaagtggtgtgtttcaccaatgcatctttcaaatgagatgggttaaactgagagttatgtcttcatgcatttagaccagaaactccatagagccaagattttttttctattcaatttttatcaccgacagaattctcattttatgtgggatgctgtcaataacaacactctccctttgtgtagcatctttctgtgatgagaaaggcattgaagagcgtcttttattacttgttcttatctgtgtagagaaatagtagatttcagtgagtggaaatccagagatttccggtaagcctcagtttgcaggtctagacacacccctaaaaaaattctgcttaattcacatttctgttaattgaatcacagcatcctgataaagccatttaagagttataaatgatgattagagctagcgtttgttgagtgcttactgcctgccagtcatgtaacaagtacttaacatgcattatctaatttcatccttaaaacaaccccttggggtagatattataattaatcccctttttaatatgagaaatctgagggctatggaggttaaataattttcccttaaactttaggctggtctgcctcctatgtactgcctgaggaagtgatgcatggggcttggcatgtagcagaaacttgaaaaacagtagccattgttgttgttttttaattttttaatttaatttttagagacaaggcctcactctgtcacccaggctggagtgcagtggcatgatcacagctcactgcagtgtcaaactcctgagctcaagcaatcctcctgccacagcctccctagtagctagaactacaggcgtgcaccaccatgcccagctaattaaaaaaaaaaattgtacagacagggtcttgctatgttgcctaggctgatcttgaactcctggcctcaagtgatcctcttgcctgggcctcccaaactgctgggataacaggcaggagccatcgcacctggtcaatagccattgttactaacaaaatatttaggttcttggttatttttaggccacatctcttatccatttcacattagtttactgctttccctttgcttcaaccagctcctgaaattcatcctagcaattcccaccaccacctcctgctgcagaccattccccgcacggcccctgcctgcctgcctctcctctcaggctcacagctggagtctccccttatccttccaggccattgtgtcccctctccaggtgcctcccactccggcatgcctttgactatccccacaccatgtgtttcctccccagcactggagcacagtctctgataggcatttttaatttgcatatctattcatgtaccaagtctaaccaaggcataaaaataacctttagttatactgtacatttaacaaatcgccctttcattgagaataaagttcactgctgtaaggatcaacaggagaccccagccacaaggttggtacactgtgctaaatagagccctgcttcatctttaggagcacatggcccaggggtgccccccacatctgctcttgtcctcctgcctgtctgcccctcctaggagcattttcatctgtaactgctccgcctctaactccacctcaggaaaaagggatgcctatgaggaggagcagacatcactcgcctactgaccctctgctggacaagctggctgacagtcccagcagctcctgcgcctcctcactctgcccacatctccccatccacggcagccctgtgcccccttccagggtgcttggctccttcacaacacaaggttctcactcaggctcgcatctgagcagctagggtagatgtcattccctaatttcagctgaaaagacagaggcccagaggggtttaagaacttgccattaaacatagaggcccctctgtggaggtccttcctcccctcctttcacttcacgagacagcatcctgtgaaggtttccaagcatgaaatgtacaaacctccaaaatcccctgaggcattatgtccaccaacatttactgcagtgttgggtgccaggtgatgggcacacccagacaagcaatacagccccagctctcaatctccatctaattagggaggctggcgggaagacaagaccacggcatcacagaacacgagtcctgggagctggagcagaaggagcccagtaaagccccagctgttggggctccttgcttcccaacaggcacctgtctggttgccagtggtgagtcctccctctgctgggcattcccacacgaatagaagcagagagcaatgactaccaccccaggtagacatgcatttgctcatccactctcagcagacacatgccaggaacttaccccagagtagacctgcaggctccaaagttggaaatggggcagaagggagaggaatgtctcacctgcctctcgcgaggggagttgaattgccctgatgccatatatatatatacacttaggcaaaaccgattcgttcacatggtgagtgaagaaaataaaaggtgctctctactcatgacctgctgtggcagcacaagtgtcccttcccgaagctacaggggctggggacattgacatgcttattggcattaggctgagtcagttctttgaactgggagaaaatggtggtctcagaggcaattataagccatgcagggtaaattacattgactaaacccatcaagtctttccccaaggggttcaaaacacttcaagtgcacaccatgctttattctccttaccttgatgataagggacgtgggagcagagtccctggcttcatcagcagcctgcaaggctgaggggactttggcagggctggggtcccacctggagcccatggcctgtgcctcttggggccataatgatcgaggacaggagaagagggatggcattctcactgaaccaagcatctgtgcccgtttatcttcatcattataagtcagattttaatgaccttagtttatcaatgagaaactgtgactcagagtagtttaaataatctgtccagaggcacacaactaagaagcagaagagtcaggattcaaaacacaattttcttttatttatttatttatttatttatttatttatttatttatttatttttttgagaaggagtctccctctgtcgcccaggctggagtgcagtggcaccatctcagctcattgcaacctccacctcctgggttcaagcgattctcctgcctcagcctcccaagtagctgggcttacaggcatccaccaccacgcctggctaatttttgtattttttagtagagatgggatttcaccatgttggccaggcttgtcttgaactcctgagctcaagtgatctgcccgcctcagcctcccaaagtgctgggattacaggcatgagccaccgcacccagttcaaggcacagttttctagctcaaacactcacccttttccaaacaccatgctttcatggtcaaaaaattttttccatgaatctcagtgacaacaggcagcaggtgttatcacacatcagcagctgatatgaaagaactgtgctatggcgcctaggcctgggccacctgaagaccctgtcagccgtgaagaggtcagcctgtacctgcagggcccagccatgcagttaagagccaaagaaaggactctgacttgtaggagcacaccaggcacagactggggtgccagatcagtcatccagagagggatatgggtgtgtggtcaggacccaagtgaaaaaccaggacaagacgaggccccaggcctccagaacatgacagaaacccggtcaatgagcctaaagcctatgcaaatagcacattagcacaggagagctgcatctgcatcccgagccctgggccaagctcctttatgccccctgccctactcagacctgtccctagtcctggagtagtgcaggagtgtgctgcagaggggaaggctatagctgtgaaggaagaatactgcagattcctgcagccagtcaaggaccaagttcacccatccctcccacccccatgagtgtgttagtcatcaacccaacaatgccaggtgcactgaacacacctgagtacctaggtatgtgccacatgtatgtgagagggggtgacactacctgaagtaacattacatctccactccaggagctgtaaacaaaagaaatgttatttcctgctcgtgtgaaattaaaaataagcatgctggttggtgggtggccttccacctgatcattcagggatccaggccccttccacccttttccttccctgaatggaaaggattccaaggccagagaaaagggtgggcctttcctctggccttggaatcctttccattcagccagtcggtgggcaaagagcttaggaagccttgaacaggaagatttttatgaatcatcacttctgctccgctcacattgcctcctttgccatctgctctctttggatttccttactgactttttgtttgccttatctgggctggtttttatgcttcgtacctaggaaacaaaaattttcagtcattgggattttttttcagggttagaattaccacactacctgtaatatcatactgtggcttctgtatcatcatttaaggtttctgtctaaaattggcacatgtaagaatcaaagaaaatggttacataattcagttgaaggtcttggtcattagatgttaggcatctattgtgtgtaagacacaaggccaacagtaacgcagaatgatgttgacctgttaagtattctttgaaacatggcctaaatgtattttattatgagctcatttttgactattgtaaatattagtggtttacaatgtgctttcgtcgtatttcctaaaaattcaagcagtgagaaataagactcctctgaatttagtaactcaaaactgataacattaaatgtgacttggaaaaactctagaatacatggtgcacacaagaagcgttcaaggttctgtggatgagtttcttagcttttgcaatgcaccatgtttctcaaagcttgttttcattaataaaacattttataatgtaaaaaaagtcacatggccacacctactgcaaagggtgctggggaatgtagtctagctgtgtgcccaaataaaagaagtgagttagatttgaaaaaaaaaaaaaaatgagatggtgtgtcacagactaagtcaaggaatatagctctcatgtctggccatctatcagagtgtcacttgagaatgtctcttcttcatttagctatgctgagcattgatcacgcttcttctccacaaagcctcataactcaaggctgaaatcaattccaggttctattctaaggtatgaatgtttcattcccaaatttttatgatgcagcaaaatcttactttctggcagaaaccacctcagaatttccccccacccccgaatttgtcatttctaaaaacaaaaaataaataaataaacaagagaaagtgcttttgaaaaggcttaaaactagcaggacagtgtaggacgatggtttccaaacttggatgaacattatgatcacctggaaaacgtatttttttctttcagagccccagatctcatacacaaagattctgattcacagatgacatattgggaccaggaatctgtattttttaaagttccccagttgactttcatgcgtaaccacatttggaagtcactggtatataatggcagatccaggtatctggatctgggcaagacagggaatcaagaagtgactggagaaatgtcattggctgacacattgtcggcaaacatatattaagcctccatcaagcacagaggatggaaaaggatgtttgatcagctcttgccagatcacaggacctccacaggcaaacagtagcacacaggcaccctgcaggttccaacagatcatgaccagggttcagcaggtgcattgacgtccagatacaggagcagtcagatgaaccatcacggagaaaatgagctttttataaactggtgcttgaggaaaatttaagtcttagagaaatggaaaagggacaaggcattccagagaaggccttcagggaaagcagaggcttggagatgcagaaatgttttttgtgggttcaagaacagccaacctggttgtgtcagagaatcctgagaaatctttttgggagagagtgagtgtgaatattaggccaggtgttttggatttaggaatacaggtaataaacagccactgaaggccaggtgcggtggctcataactgtaatcccagcactttgggaggccaaggcaggcagatcacttgaggtcaggagttcaagaccagcctggccaacatggtaaaaccccgtctttactaaaaatacaaaaattaactggacatggtggcatgcacctgtaattccagttccttgggaggctgaggctggagaatcacttgaacctgggaggcggagattgcagggagctgaaatcgcaccactgcattccagcctgggcgacagaaagagactccattccaaaaaaaaaaagagccactgagggccaggcaccatggctcacacctgtaaacccagcactttgggaggccaaagtgggcagaacacttgaggccagaagctcaagacatatgttggctcctggccaacatagtgaaaccccatctctactaaaaatataaaaaattagctgggcaaggtggcgtacctgtaatcccagctactcgggaagctaaggcacaagaattgaacctggaaagtggaggttgcagtaagccaagatcacaccactgcactccagcctgggtggcagagctagactctgtctcaaaaaagaagaaaaaataagaaagccactgagcacggagataggctggagggcgggaagcacagagcatgggggatattggaaggtcttttgaggggcccagtggcaagtgattggagcctcagtgtgaagctcagaaagcgtgaagaaagaacctggaggagaagaaccttcttcctctgctgtcttccaaatggcaccactggctcaggacagccttgggcgaacttaagtagacatgggctacttaaaattattaagtgaacttaattaggtttgtcaatccctaaggttggcagggtagcaaataaggcaatatattcactgtccatcgacagcctgttgcctgaacgagattgtgcattttctgagctgtacgtgagcagcttcagccgttcaagaagaggagaagagatgcggccggtggctcagcacacgatgtgcaaccaggcattgatatatagaaatcaaacattcataattctggaaggatctggccctgtttctttctcagaaaatatcccagatcattggagcaaggagtagattagcaattctgagctttaaatcttatttctaacgctgatttactgtgacgtttgggacaagttgttgcttttgattgctaagtttccacaatcaagagtgcaaagcagtgagacagatccggcccatgagcttggtttaggaggcagttgctcaaaatggcactaagtgaacctctttaaaataacaggatgttcgaatctgctcaagattttcttggtaacatccacagcttggcttacaagtcaacagatgtgtatgtttttcataattcttaatgtctcggaaaatgtagccctgtgttctcagccccttctttccctaaacacaaagcctgcaatttaggagataattgagcttccaatatttgaagcaaagaatccagttctatctatgctgcccccacccccgcgccaggaacctcatcaatgctcataacttccacccttacctctatgcagatgactcaaatatctttatgtccacctgggttccacacctgggtttccagctgcctgactggtgtcccacccacaccttccacattgctcccaccagcacaccccactgcctagtgagagtttcgcccatagttctaccattctccaagacttttcattattttaagtctttcttgacttctctctcattgtccagatgcaatgtttttccagcttgagtagcttctagctctatagggggcacaactaaaagagacttcagcaattcccggtcagtaaataacgtgaatcacatcactgactgaaatcctcgggagcaaggtccacgtcttacacatctctacactcctagctataggcacaagtatgtgatttacagtacctgcgcagataatctctgctcaaagaaagagggggagagatgtcatttgtggcactgcttgaggaagcacatgttactagtaaacatataatataaaacaggagcaataaattagcatctcatgctaaacaaagggttccattgttgggggaaaaaaacacatcttacatagattcttttaaaaaccaagatggcaccttaaaagttttggcaacttgcccagggccccaccaactatatagacccagtcttcactccactctactttttgaaactagtcctcaccaagcagaaaagacttctaatttactctcataaagatgcttttggtcaggcgagaagagaggtagaaaccaccctttttctgggtcttctcgccattgtcagtgctgccatctcggtaccatgtcagctccccaagccgcaagccaacacagcaacagaggacagaggaaatgtttgtgtgttccaagaaacggggagcagacatccctgtccctccaagaagaatggatggcgggcctttctagctccagacagccctcatgcccccagtcatcccaaggagcttgctctacttttccgatggtacggagtacatatgagactaaatgagattcgacaagttggatggttctgcaagagatgatgggaaaattggccagggatgcaagaggcctgagctctcatcccacatccgctactatctccattgcaaccacacaagtcaaaagaatggcaggggcccaagaggcacttgaatccttccctagggcacttggcatttgactgtaggtcgagtatttttgtgcacaggcccctcgcttgctggaccatggctccaggaagcaatgtctttcctcatcaaaacccagggcccagcagagctcaacatacactacacagatttcgagaatgaaagaaaaacaggaacttgccagagatgggtctccatctgctgtggtggaacatccttgcagcaggcctttccagttggtgacacaccagagcacaggagggagccaggagcctttaggctgagcccccgaaagtgagcacagaatgcctggaagcctcaaactgagaatgtggaagggtctgagtgattctccatgcttgctcagcctggctgaaaattcattttctctcttatttctagaagggcttcctcaccaagccagactcattgtgaaagatctctatggcccttgaaagccctggaagctctgtgttgacttttactcatgctcctggtgtcgttatgcctagaggggaaaccaaggcaggaggtggtaaattacttctaagagtgggatggagccaggaggggtatgttcccaactcctgagtatggccttgaatgtccagctcatctccagtttactgtgcagaagttaaagactcctagagccaagacacacattcctagccatgattgcgtttgacatggccaaggatggtcccaggaatccaaagcggtccatcagctcccatcttcatcttagagctgaagtccattatacagataataggagggatgtggcagggctttttcttcacatatattattctaatagatatgcctactgcgacccaagcttcatgacagcccattttagaagacttttgcagagcaaattaactgtgcagcgagaaattggagaaagtgtttttcctctacagtacctgccagctctatcctaagcagccagggcccagacaagcaccagcagcaaaaagggatgcaggacactcccttcttccgagcccactaaatggccaaggaaggaatgtgagacatggtgcccagctggcaaatgccttctacccagtccagccactccatcctgctctgccctccaaagcttcgccattccctccatccacatcagacacaaacctttctgtcagctacttaaaatcattaagtgaacttaattaggtttgtcaatccctaaggctggcagggtggcaaataaggcattatattcgctgtccattaacagtctgttgcctgaatgagatggtacattttctgagtcgtacgtgagcagcatcggcatttctcaggcagagatctgcccgatgagtctccgaggcgcccaattctgaagctgcccttccagacttggcccactgcccagatggccacctcccagatccccgctgagtctgttttcaaaaggcgtctctgtagagctgaatgagaagagtcagggcgaatgcattctttatgcaaagccagcctccaaccaagatctctagccaagtctgttttaataacaagttccaaactccaccggctggaaaaaagaaaagaaaaagcaacaacaacccatgcaatcaaaagtgtcctctttgaagaaacagaaagagctgagcaggtacgaactatgaagggtcaggagcaaaatctctgctgctaagcactgggaaagagaggagactcccctgccacgttcttaggcaacacagattggtgagagagtggaaggaaccccaaagggctaacgcttcccttctccttgaccaggctgcccacagagaggaaggggaagcctcttctatcctggggaacccagcctcctttccccatccagagctgaggtttcaaagtggggcagaggagtaactatgttctctaggatggcctgtccctcgcagtcttggcagtgatgtgtcagggtccttgctttctttcagccaaacccagggtggctcatctggtatatgtcagaaccttccctcagtcccagagtggtctacatgccagaactttccttcaatcctagaatggaccacctggtacatactagaacttttcctcagtcccacagtggtctacctggtacatgccagaacttttcttcaatcccagaatggatcacctggtacatactagaactttccctcggtccgagagtggttcacctggtacataccagaaccttccctcagtcccagagtggtacacctggcatatgccacaacctcccctcagtcccagagtggtccacctggtacataccagaaccttccctcagtcccagagtggtatacctggcacataccataacctcccctcagtcccagagtggtctacttggtaaacactagaattttctccctcagtccaagagggtccacctgatacatgccagaactttccctcaatcccagaatggaccacctggtacatactagaactttcccttggtcccagagtgggctacctggtacattctagaactttccctcagtcccagagtggtccacctggtacatactagaactttccctgaatcccagagtggtccatctgtatataccacaacctcccctcagtcccacagtgttctacctggtacatactagaactttccgtcagtcccagaatggaccacctggtacatactagaactaacccccggtcccagagtggtccaccgggtacattctagaactttcctcccatcccagagtggtccacctggtacataccagaaccttccctcagtcccagagtggtacacctggcatataccataacctcccctcagtcccagagtggtctacatggtacatactaaaactttcactcaatcccagaatggactacctggtagacactaaaacgttccctcagtcccagagtagtccatctgtatataccataacctcccctcagtcccagagtggtctacatggtacatactagaactttccctcagtcccagagtgggccacctcatacatgatagaactttcccacagccccacagcagtccacctggtacatgccaggactcttgctcagtcccagagtgtgtcaggtcccaactaagtgtcaggtctacctggtatataacagaattttccctcagtcccttggtagtctacctggtacataccagaactttcccttagtcccagagtggtctacctgatacataccagaactttccctcagtcccatggtggtccacctggtacatgccagaactttccctcaatcccaaagtggcccagctagtaagtggtagaactccagacctgaggccatagctgactctggagagtgacatggtagctgtacttctgggggactcacggaaaggagtgggtagaaccaggagactgcgagagccttgaggaagcctttcccatctccagcaaggagacagtaagcggtgccagaagcaacctcttcttcacctatcaggtaaagacacacaaccaggcaccttcgaaagtagggaaacctgaatctgggtggtcctgatgcccactctgtctctgggccagcacatccacagaaaagagcctcctagattggtgctgctctacctgctgactgcccatcacctaccacccacagaccccattcctagacggcctctgctcctgccccaccctccacccatccttcagcagctcacctttgtcccacctttgtcccactgtcccttccctgcagcctctgggggctggagccatgggggagggttggcccatggatggacagaggcacccatgtgtgggtggccccgggtggacagaggcagcactgcctggttccatattgccatctgattgaatcttcctgatggttgtgcgtgttcctgactcaaaatatgtgcaattcacagtgtcaatcaaactcttttaagcagcagctgccactgctgtcgccgcgcagagcactttagaaactcttctatttagaaaccattccagcctcagccggcatcatcccatccatgctaagaggcccagtggctgtgagagacttcgcagatctaatctcttagtaataaggaaggaaggcacagagaggggcagggagacatgcagcttcccagggagcacccatttagaggatagccgcgattctgtccccccccccaggcacacacatgtcatttactcgctcaagcccctctggcctcctggaaggtacacccctcatatagctcagcattgaaaccagggcctggcttggcccctggtcctgtgaatgacagattaggagatgatgacctggtggagaaatgtgccctgtgggggcactcaccccctgatgtgcaggcgagccaggcagctgtgccttcctgatgctcccacagggaacctgagtccttctattcaccctctctgtcactctaagtgcctgttttcttgctacctggaagcagcattttcctaagggttgcacctgctttaacaagacagcagtattagggccctggttttccagttgagatcccaggcttgggctttgtccagggttacagaggctcaagccagaaactcatctatggactgtttcccatggggagaccccacggaaatcgtggctataaccttgccaagatttgtagagaaacctgatgaaggcgtgtgagatgtgtgcagaaatgcctctcatgctgtctcccctgcctctgcctcctctcctggtccccatcctgcttactactcccatcacaattatcctctaagaggtctttgatcttgccactgtcctgttagaaacctccagtggctctccattttccctgaaataatggcagaacctccttgcctgatctctgttcagaggtccacaccatctttacctccttcctcactccttgctccccagcaggacaggtcctatccctgcccacatggccctcacaccagttcctctgctccagacatctcctccctgcactgcactcccacacccacatcctcaagcccttccctgcattcaaaaccaacttaaatactgtcttctctgtgaagccctcctgctctccccaccctggtgtaattcccccttcctctgagctcgcacactgctgtatctgcacctttatgaagcattgacctccttctactttattccacaccaaggtacacacacttcatcttcacactggacaataagtaacttgaatgcagcgttcatgtcgatttctcttagaatgccccatagacctatatgtaatagctttacaggaaacaaaaataggtgtgtatcaaggttggaatgagagatgcctctcagaggcatacaccccagtgccagagtggcaggggctgagggtccttgtgctgtccatcccctcttgcacactcatctggcatgcccaagccacccagaacaggatttgaaggttctccatcaggcacttctccttccacacccaaccaccagcacacactatcctgactgagggtagcatggagacttcttcatggggaatatggcctgaagggccaaccccagtgatgctggccacggctacaacagatttgggcatttcttctttagaatcaaaccagatttgggtcctgtaattgtgactttcagacagaaaggattgtttctgaatgaccagatctcacaagatggttgaaagcacagataaatgtatggagtagttcagttaagcataatcgatcacagttattcggataaaagttttgggattcaaggctttgctccatggaaacagtaattgttctctggccaggaataaccaagccagcatctaacaagccagcatcttctacacgttgatcagagatcatctgcacacaggcgcaacgggagcttccaacccctgctgtagtttacccactggctaaagctttgctgcctcactgcaaatccatatgagcaaatgccctttctttccatatctcttcctctgcatctttcctcccactgttgacatcccatttcttgtccttgttgtaccctgcaggccctgttctctccatgttgccagtgccaccctgctctggttttctgctcttgacaccctatgtggccaatgccctgtggcctgggttccctctctcttcctctctctcctttttttctaacacctttatcagactgtaatttatatatcataaaatgcacccactttaagtgtacaagtcagtgacttccaacagatttatagagctgtggagagagcaccacaatcccgtttctgagcattttcatcaccccaaaaaaagcctaggtgctagtctgcggtcaatcctgtgcccactcccagccccagacaaccactaatctgctttctggccccacagatttaccttttctagacattttctatcaatggaatcattcaataggcggtctttcacctactgtctggcttctttaacttagcatcacgtctttgaggtccatccattttatagcacgtctccgggtccatttttgaccattgactggcgtcccatcatatggctgtaccatatggagtttgcccagtcaccaatggatgggtatgacttctttctcttggtgttttcatacccatgccagagaccacgccctgttctgcatgtcattctggattgacgttctggagggtaggaaaggattttaaggttctcaggaaaccttcacttagagcaggaaagggccagctgactctgctagccttccatgggatgatttcccaggaaacaaacaaaccaaaagtactttcctgtttatgtcactgtaaggccttccctggccacagtctgagaacctggccctccaaggatatgaaagggtgggggaaagaaacaatatcttaatgggtttgttgttaacacttttatgacccctgtgttggttacaacacttccaggggtgatagtcaagtcgcttaatatttaaccaccaggcaggcaacctccagtgatgctggatgaaacccaggatgcttgagacccctgctgggctaatcaatggataaaccctatgggtgctggttaattgggaaattgaggggtcggggcagcagggaaggagccagttgcctgaagcaacaagcaaggggaactggtggaactgtggttctttattggctggtacagaagcattttaatattttaataatgacttaagccccactggctgaatgtcagacctacccatttctcctgttcagttcacccaaacaggacacccaagctggtatttttttccccaactcagtgccttgaaatcactccccgtttactgaacgaagcagttactgtcagatttcttcccatttccaagcatcctgcacacccagaaagcaaaagatttctcctcagattatcagggagtcctggtcccaggccccaaactccaggctggatttaaggaccagtgtgtcagccattaacagtacggagcgatagttcggaaggggaagtgctctgcattgcagaagtagggggagctgactgctcttctctcgccactgctctgggattagcgagcctttttcaaactcacattctgagccaggtgatcagcacacacctgctggatgctgaatcctaagacaagaccccccagtttgctcctcacacacattcctcttgatgtgtacaggttctggctgcagatggtcgcatggtggggacaaggatccagagccatcgtggcttttgacaatatctccatcagcctggactgctacctcaccagtgagttcactctgaccccagcactctgtcccccaacccccatggcccatggcctcattgtcccctcctcagcctaagcctgactgtctctcccacctccctcagtgtgaaatcatctctcaccctgaaatcaaccctcacctaactcagcccgtggggtcttctctattgcagttagcggagaggacaagatcctgcagaatacagcacccaaatcaagaaacctgtttgagagaaacccaaacaaggagctgaaacccggggaaaattcaccaagacagacccccatctttgaccctacaggtaagggttcagctcacaaatgtgagcacagtaacttcttgttgcaaaaggcagaagaaagattggtgctgtctttagggtggggagctgtgctgaaagaatgaaacagtctttagaaggagtatcacctacactctgactatggggtccaaggggaagctgtctggttctcatattgcctgagcaaaggaaacctctggaggttgtacaaaggagcagcttcctctatgcctagggaatacctaggccccacccaaaggagagaaccaagctggcatttttttccccaactctgctttgaattcactgccgccttactgaacaaagcaaagcttactgtaagatttctcctccttataaagagggctgggcctggccaaggttatctgttgcacaaaggtaggctaccccatcatgggtaaagcccccaaagcttcctttcaacacagttcccccagagctcagatccctccaaagctgttctattcagcataccccaagccaagacttctcatggccccttgccacttcagcagaactcgtcagcctctggttataaaccacaggtgtgacttctccaccactcttctattagaccagcggctgtgaacctagccccgcagaagctgactaaggctgccccagccccatgccagccagccaagggattttcccaggcaggcactggtgcctgggcctgtgaggtgtcttctgctatgtatagcctggagaaacaagtgtacaacacacagtctacccacactctttttcctataaaagataagtctttatcaaaataataacagatcaatgataaatctctaatttcaacttataatgtgaaatccttttttggcacaaagtacaaaaaatgaggtccatacctttgccacatctgctctcaacatgtgaactagacattagcatggctttgtctttgaaggagtcctttcctttctgtcccatgaaaagctgccccagggctaaccgtcaccccttcctgattcctgcctgatctaatccagctgccagacccaggagaaagagttagttacttttcgcatcatccctcccttcccctttaactagaaccatgaaagacctttgtatattcccacacagaggggagcccgtcctacaaaactgcagctctctctgctttccccctcacctcccagttcatgccaatgtctcacctgatagaggcagccttctaacttctccattcagtgccctaccccccaggcccagtgattcacctccactctctccttggctcttggtcaactaccacctccctgttataaattcaggaaatgtataaatttataaatggagggaagaagccagacttccccttttagtgtgctaagtaaacatagccatagccccctgcccagcctaatcaacagcactgattacacagcagagactccagaaacatctattgactagtgggtggctggatgcctgagcttggatctcaggtgtcagcagccagccccctgcagccagcatttaggaaacagccatccaccctgctcaactcctgagtttattgccacataactcccactgtccctaaaaggttactcagtaagggcctgcccaatggccactcagactaatgaaatcaccagtggctcacacgtggcgatgactcccccaccacctctaaataaaattacaggctggaggagacagcagctggaacacaagtctccccactgagaaacttgacccctcattctcaaccccagtctcagagcaatactgaggtagtgcctatgggtccaggcagactcatggaggcagaggccaaggccacacccagtcagtaataatcacccagcagacacgtgcccagcacggtgcatggttacaacagggacagggctgagccaattcttgccattctggagcttctgggccatgggaggagagtggcctacgaggcagcagggcatgtttgcaaagcccaagctcagagcttctacctgggaggccccctgaagaaggacagagggataggccagagggggaaggaaaggaaaggaaagatcatagagcgtggtcccatagcctaggttatttcacacaacagcttgtcctcacacaggcccagggacagttgctgtttttaccattatagggatgagtaaaatggtatggaagaatttaagggccccaaggctggaaggcagtagggccaggaagtcaacctggagtccacattctttcacccaactaagctacttctaggtatcaaagtctccaatcggagataaacactaaaaatggaaaagagcagggaagagttccagccaagaggccctgaacgaacagtaaacaaatcagctcccaaccttctgacaaacaatcgaggagacaggataataagatttttctttccaaagttcaaagctgtcagtttctgctgggctggaacgaggtggttggtggcatttcaactctcctccgggcaggctttagagaactagaaacgcaaaggccctttggggtcttttgagaacagttactgacaacacttctaagcttccctaaacattcctcactccccacagcagccctcccttctgatgagggactcagcctgactccttggatctgggaggttcttcacctccaggcccatggagcagagctgagccgctcaagtttccaggctgggaaaatcctgtccaggtgcttcatgcagcattctcggaagactctgagtcactttagctaatcagatgaagatgctgaaagagaaaatggggcaagtattaagtccagggaaattacatttgtcagctttgcacatacaattacactaaccaaatgattggggtaatgtgaccacggggctgcagagccaggttcttctctctctctctctctctctctctccctcacccgactccctccttctctctctctctctttctatctctttcccctccctgtgactgtctctctctggcagtaatgaatgttagcagtgaggaggaacagtcaggctctgccacactctttccctaaaaagcccagattgggacaagcaggccccccagggcccaaggacccttcctcaacctccctacccctctatccttctccttggagctcagaggctgtctgtgcagggcgagtctaagggaatcagctcagctaatgggagaacccgcccaaactttgggcccaactccacaaccctaactatggagccttggcatcaaaaccacagccttgcctctagctatttggtgagaggtaggtctgccattttctgcatacacatctctcgccaaaggggggataaaagcaattaaaactatatagtgtcatgggaaaagcactggactaaaagagagaacacccccactgggccctggctggttgcactggcaagccgtgggcgtggggccattctgcctctgcaggtcctcccatcggggcaagtctgcagatgaggggggttaatgtgaacacagacaagggcagagagactgcaattttttaaaaaatcaaggttagaagtagacagtgtccaagtcccttcccgtttccagctccaagattccaagggttgaagggcgataccatcagggagccatggctttatttggcccatatctccaattaacccatggcactgctaatgtgcccagaagtgagggtgacaggctgtccactttcacacacgctcctgattcaagaacagatgccaattccaatgagaaagttttatatgtttcatataaattgattgggtctatttctgctaaatgcattatccattcaccacagaacaactattagagttaatagaatttgtagctagagccattatgttccaagtacgcccttctggggatgacggcatccttggaaggcaggctccacaggcctgcatcctccctcagaccctgtctttccactcgataggggtctttgttcccctcagagcctgctgcactcaggcccggcaggtccggccaagcctacttcagtagcacaccccaatagaggaggcctcttcccttcagagtcactccgttcctgaatcaataatgtattctaatccagttccgaaaaatcctggcctcttccttgctagccctgcagaaaatcccatgctggggacagggaggaagccaagttcctctctttagccacagctcatcattgcatcccagccttgaaggtgggaggtccaagatgtgagaagtccagagacaagtcagagcaggaagcaggaagttccctctggagggaactcagatagactcttgtgttaatggcatcattaacagctttccccagaaatccccagttacagacgcaatccaggactcacaagtgcagcagtgagctggccagccaaggaactagattcagccccaggtttctccaagtgtgtcctcaaatcatcagcatctgggtcccctggtgtctgcaagtgctgcttgttaaaaatgcagattcttgggcccctgtcaacctatggaatccgaatgtctgggagcaggaagtcaaaatccacatttttaaccatccctcaaggaaagtttgattagcaaaaaagtttaggaacccgggactgcatcctgacctacagacaaggagcctggcccaaagcaaaggctttgcatcacattccctcttcacgcagcaatcctaactgcgattcaccaagcactgctgtgtgccaggactgtgctgagctcttggtgctatcatagtatccccctttaacagatgaggtccagagaggtgaactaacttgcactaagttagacaacttgtgtaaaaggcaaatgatcatgtttcttaaaaatcatgcagaaagtgaaaatttctaagccagataacatttagaaggtcaaagttgtgataaagaaatcttttaggaatcccattattgaataggtcttcgagagggatctctctttcattactgaatagatcttcaagagggatctctctttcattattgaataggtcttcgagagggatctctctttcattactgaataggtcttcaagagggatctctctttcattactgaataggtcttccagagggatctggcttcttatgttagttttcgtttcaacagagcacatctgcatcttcactaacattcaagacggtgccccaggcaggcagtgttcccacgcacatgtaagaaagctgataattgcagctaattggcattcctccatgctccccagccttcactggtgcacttggaaggcacttctgttagcacccattcagctggggggggactgttcattaaggggtggcaggcatgggaccgtagttagaacccttggagccgcttgagacactggtcatttccctgctcagctgccctgctgattaacctcatgctctgtgttcttgcttattttagattatctcgctaattttagattatcacctatttatagcaagcacactagtgatgacgcaggaagtaccagccttaacaaggctcttgggaccccagtcatcgcagcacgttcggcgccctcccaattagaatgtcactattcatttgggtgtgtctcccttccctggagcaagcacagctgtgctccaggaagagaggtggcaaagaactaatttgtgattcatgatcccattaccaacgctaatgagtctcttccagtggaagaggctttcacgctggagagccagtcagcatccccaagaggtggacatcagtgaacaccagggttggcttgatggtgagaaagcacttctccagggacctggtgacggtgacagggtggaactggaggctgggctgaaggccaagcacccatcagcaatagagcttcccagagtgtgttccgccatttgtcagccacctccttccatctgaacacagggtgacagtcactaagctcattcagtgtctctttcatttgattctcacagactccctgagggagatgtcactatcaggaagcaatatagcatcttttttaagagcacagactacctgtgtccaaaccccagctatgccactcactctaagcacctcccttctgctgtctgtgcctttgtttccttgcatcaaaaaatggtgcttagattatcaatgcttacagcgcttaggtttgatgcaaggatcacatacgtttatatgtatccagggcttagagaggtgcctgacacatacggagctacctgagccatcattttcttcccattttacaattgaggaaacagaggatcagaaagattatgtgacttgacccactaatcaaatgcagggccagggttcaaagtcaagccggctcaatccaaagtctttccaactctaagcccatgcctgttaggaacaatactaaatactgcccaattgctgaccagcataagggagaagctcttgctgcatccaaatcagctgttttctttccactcgggagattcaactcagcgcccaatgcagacaacatcattgctttccctgaatcccaagcctagggactaacaactcatatagttcaatttaacaagcatgtactgggtgcctgctctgtgccaaaccctatgcaggggcctggggctctgaggctgtgaacgagccaaagtgttctcttgaaaaatgattacccaaagcttcgtctgcataagcccagtatgaagccactactatcccagcacaagagagacttctgattctgatcacctctagaaccaggacaggtgccctcacttgaccttgccctagatggtgcattgcaaattattctgaactaatcatcattttcaaaatgtgtcctgtgagatagaaaggcatcaacactattatttcagaacttcccaaactcaggccctccttaagaaatagcacagactcacccagctctgacagactcaaagatgcctcatgaacctccagtctaatgctaggtgggggttggaattatggcaaagctgctgacaaaatgcttccacataaagtcgatactgttgcccttctaagcagcagacaggaaccattgcctttctctctcctggctggcctgagaaaacatgttgttttttctcatttgtttcagtgaaagcttgcataagtgagagacaataaatgatccaggaactctgggctcagtatgccttgattaagatcatttagcttgaagactaacagaacacaaaggcccctccatcagggcaagtgcattaagtacttgtttgggaagactgcttttttatcattcttctctcagacttgctgcttctgcctgtaaaacagctctgcatcttctcagagcctatttagctctctgcttgttgcagcaaagcttcagtggttttggacaaagaaaaacattttttttaattcatccgggcctggaggtggacagtgaatctaggagtaaaaaggttaaaatgctaactcttgatcacaaaaggtggtcttcccagcttgcccctctcctattgagaggaaaagaaacaagaggtggaattgccttagctatcatggagtcagggaggagagagagggcacagggcagaactcagcccagccagtgccctccctgctgggtgcttacacaaaagatgaggaggccaaagtgtgtaccagctgtgcagcaggggatttggggtgcctggatagttatctattgtgttgtaacaaatgaccgtaaacacagtggctataacaacacacatttattataccagtttctgcaggtcaggaaatcagacacagctcaactgggtcctccacttcatagtctctcgtaaggttgcagttagggtgtcagccaggactggggtctcatctgaaagctctactggggaagggttcactgccaaactcatatggtggttggcagttcttggagggttactggactgagggcctcacttcctaactggctggaggccaaccttggtttctccccagtatggcagcttacttttttaaagctagtgtggggacgagggggtggggtggggagagagagagagagagagtcttctagtaatacagaaattataattttataagcaagaaaacgacatctcaccatctgtgccatattctgttggttagaagcaattcacagatctcacctatactcaaagggaggaggttacacaagggtgtgattatcagaagctggagaccactgaggccatcttagagcctgcctgtagtggcttctccatgctggagacgaacattcaccaggaagctctgggagcccagtggggattctgatgggcagaattcctaggatcaatctcaagactatgtattcaatattctacagatgcttaaatagtcacgaagcacctactgagtgccaggcaatagcaagacagtaagtgaattggcatagaatcccagagaccaaggttctggccatgcaacttcaggagagtcaaagattctgggccccgtttcctcatccatcaagtagggatattaattacctgccacagttctttctcagagctggctattgtactgagcaaatgagatcatttctatcaggctttcaaaggtacaaaacaatatgctgatataaaatgctgttgtgacattgtaattaacattattattaaatatatatgtaagcaaaaagatgggccaattcactcacccctcatgtgttgccttctataaatattcagtgcatttacagtccacctccttctatgagttgtgcacacttttgtgtatacacgaaattctatgagctgcacactcttatgtatacacataaatatgtatctggaggggaggttaatatcttgaattttgtgtcctctcattcagtaaattcccccaacctaattgctcatcagttttcaggtaaagccctcaaactccccttgggggaaataaatgatttgtgtggggtatagaggattgcccgaaaaatcctctcatccgtagaatttaaaagaggatctttagtcttctaaagcttatcaagatcttgaaaacaatggatgcgtcaaaaccttgttcacgaaaattcttttaaacaaatttgaagtgattaaattggagatgctttgtttgtttgttttggggtttttgttttgttttgttttgttttttgagatggagtttcgctcttgtcacccaggctggagtgcagtgccgtgatcttggctcactgcaacctccacctcctgggttcaagcaattctgcctcagcctcccaagtagctgggattacaggcacctgccaccacacccagctaatttttgcatttttagtagagacggggtttcaccatgttggccaggctggtcttgaacttctgacctcaggtgatccactcgcctaggcctcccaaagtgctgagattacaggcatgagccaccacgcccagctctgatttgtttttatggtgaatattaacagtgtcttcataataagataagagcaaattgtagtcatctaatttttattattttttagtaagtgattggcagatctaacaatgatcatattctaggaaaaatgttaaaaagaaagaaaacaaggcttagtgtgtggttgtccagcaacctaactgagaatcagaaaaactccctgagcgtcaaaatagtttcctggaaaagaggactatttctttcccctcagctggctttatgatcgtgatcctactaactagaccattcagtctaccagccaatccatttcgtcagacatgggattaggggagtggccacgctgctaaggagtaggactcacgtgttttcttaaaaacacagggctcggccaggcacagtggctcatgcctgtaatcccagcactttgggaagccaaggtgggcagatcacttgaggtccggagttcaagaccagcctggccaacatggtgaaaccctgtctctacagaaatacaaaaattagccggtgtggtggtatgtgcctgtaatctcagctacttgagaggccaaggcacgagaatcacttgaacccaggaagcagaggttgcagtgagctaagatctcaccactgtactccagcctgggtgacagggcaagactctgtctcaaaaaagaaacaacaacaacaaaaaaaaaacagggcaccctgcattttggatatgtgtatgcatgcatgtatgagtgtgggctggtgtgcgcaattgtgtgtgttcgagtgagtatgtgagagtgtgcgccagctcctcagaagcccaaccccttccaatcatgcgtaagagacaaaacaaaatggctttcagcaaacgtccacttacactaacaaaaccactctggtttgtccatcttaaacattctaacactaaaacaggagccccaaagggccaaaagtgtcccagcacccactcactgtacccctggcatgcatgaccacctccttctgaccactcaggtgggtttggagatggcatttgggctactctgttgtttctatttcattttgctttggttttgtttttcacataacaaagatttattaaccaccctctctgtgactagtgctgttttaggccctggacacaaagcagtgaacaaaacagacaagccctactcttatggagtatatgtgctagtgcagaaagcaaactagtgtatagacagcatcatttcaaagtgatatgccgtgaaaatagtaaagcaggtcaaggggacaggggtggtggtggccaagcacacatgtgtgtgaatgtgggccctaacaatgaagtatcgagggaaaaaaacttcaggttccttcaaggacgtgggagcagaatcaggaaaatgctactggctactaatattaagatgctacttcttactctaggctggtgtggcctagggaaatcttcaaggccttccacaacatccttgcaacacccaaagctctgaaggccttgacggtgaagtgcactgagacacagcagagggtgggtggagtaggggagcatgccttggctgaccagactgggccgggggagtgaccagggtgcctggctcttcatcgaagaagtcaggcagaaggccacgtgcagtcaactctgaagaagcacgaaaaagttggttccaatccaggctggcattgctgtttgagagacagcagcaggattctctgttcagtggtgtttcattgcaagtagctgggagatcttgattctaggaggctccattgaggttgaagtaggatccagccaatggctgggagcccaaggattagtccagtcctacaacaaaaactattttatagatgactgctgatgttaattcagtggccctagaagtgactactgtcattatccagtgcctgataatgtcaagactcacatctctgagatcctcttggccttttcttcatgcttgttgcctcatggttacaaaatggctgctgcaactccagccaccatgactgcattgcagacaaaaataggaggggaagcatcccttcccttcttttctctagtcctctagtcttacacactttgccttctcttcttggtctagtatttggtcctaatgcttccccactgctttcttttctgcccctgaaatttggatctcatatcttctcatatgcgtctcagtcctccaatttattttagaggatctgggacctagacccagaagtcgggacacctttctagctccaaatccccaagccagttgggctgcctgcacctccgtctgctcatctgtcggaagtgttacaattccaagggccttgtagagatttcagtcatcatgagttagaaccaaacaatgagcaggaatgacttagaatagagtgaggggctggggcttcccacacgtttgcctctctcttagatgctagtgaaccttacaacaggaggccgcaagtcctaatcacataacccctatggtgatgcactagattaaatctctcctatccgcagacaagaatggacaaggcagaagtccatgaccctttgggcttgagtgtggcagagctggtatttaaaccaccaaccacttcccacttaagcctcaaaaccaaatccattatgcgtaacctgcagatggctgagtccacagcacccatgtgatatcaaacactttattggccccactctggcccgaagccaagttagaaataaccaaattagccctgaggcctcccttaacttaatttttacagctctgctttcagggtagtgtttttcctgtgacctttctcttctcccttgtgttcctgactttcccttggggagcagggggtggctgcgaacacaatacagcagccatcacaggagccattaaaatctcctgcagatcactgggtgtcagagctgcttagggcaattcagccctgaaagcagcttttatctagacagccccagcttgctgccctgttgatgggggcaagctcactcggaagtccctctccaagaaggggtgtctgccttccgcagggagggagatgggcctctggtctttgttccatgggatacttcagcattatcaggcactctgcctgtctagagaaactgtgtctggagcaaggaaacaacagtgtaacagtaaaaatgagatcatgtgtgtgagcatttctagtaaaagacagggctggtgtgatcattgttgttgttaccacccctaacttctcatcatacacaaagaaccacagagaaagctttgcctgaatgaacggggtgggtgtgtatacacaggcacacatgggcaggcgctcacaggtgcacatgcaagcatatgtgcatgtatgtgtataagcacacacatgtgtgtacctgtgcatgcacatacacgcaaataaattcggtctgagaaacaagctggaagaacagcatggaaaattcatcaactgaaaacagttcgtgttgtagaaagagggaaggtgatgtgcccctcctcacttagccccaggtttactttgcaatcactggccaattgcttaacttttctacatgattgcatgacttatgagacaaaagtcacagttcttctcccttccctatctactgacctatcgtggttgtaaggagctaggcttactggaggagaaatgtaccataaattgtccattgaaattgaaggcctcaacattctcaaccctgttcattcagaatcatgataccatccttttatctgaagttagacttccaataccttccaccatccaccaaatataaatgccaaaatataaatacgttccaaaactgtgacataaagattttctgcagttaactgccccttagcctgatacatgaagaggggtagggccactctcatgccctcacctgatcttagaggtaaagtaagattaaacacgggtggacatgctgcagtaccgagagacacctgccagcagagacagagtcactataaaatatttatgcctgaggccatttagtgaagagtcaaatagccctaaacaactcattaagtctgggaagcactatcaagaaaaggttaaattatacttagtgagctgtatcgaaaataggcagagcataatgaaacggcaggttctagaccatggtcattggagatgtccctgaggtgaaatctgaaaaaacaaacctgcagcccaggaagagaaatgcaggtgagggctctgaccagataaatggcatacaggggctcaccatagcaaatgagctcaaatgatttctacatttaaaaaatgtttctaggattctgggaagagggcagtgatggtggtaacagcatagttttttttttttaatctttccaaatccctacataagcacagaacacccatatatcaaaactgaaaacccatgaacaatattgacagcaaaatttgaaaataaggcattcccctaaaacttcaaaatgcaagtgagataggtcaaagcaccaacaaccacaagacctgcatggtatcagcatctgtacaagatataagacaggaaagaaacaggcctgagaacaggagaacccctaagtagccaagagatagttgctagaaattacagaaagccagtctgagagcagcttctgaaagtgggagcggctttgcccagtgcaggggaccaggagtaccacagtcagatctgaaggcgctggagcagcctggccagcaaacgtcattgcaggaaagggcccacttggagaagaaagttctggggataaaatcaatattgagtaggaaagggataatagagaataaataagagaatgtccagataaaagtgaaggaaagaaacagtcagaaacctcagaaagcaaactgcgtttttttgttgttgtttttttttttgttttgttttgtttttgaggcagagtctccctctgtcacccaagctggagtgcagtggcatgatctgagctcgctgcaacctcagcctcctggcttcaggtgattcacctgcctcagcctcccaagtagctgggacataggcacccaccaccatacctggctaatatttgtattttcagtagagacggttttaccacgttggccagtctggtcttgaactcctgacctcaggtgatccacctgcctcagcctcccaaagtgctgggattacaggcatgagtcaccacacctggccaaactgccatatttttgaacactgtattaaaaaaaggagtagagggagttctgtgaaataaaaaagctcctgaaccctaaaaatccaggaaaactaatctcacataaaaatacataacagaagagcatcaagatcaaatatcattcaaaattaaaataagaaaacaaaaacaggatacagagggcggaataacacgcctacagaaagcaaaatcatgccagaaagacgtgcttattggatgagtcagaatctaaccttctgttttaaaatgagctaaaagacacaaaaacaataatacaagacatgaaaaataacgtaagtcattgtaagaaaaacagaaatgtggtgctagaactcagcaaagaatttgcaataaaagaaaaactattttcaaaaatgaaggctaatctattaagggaaggaacaaaaagccaacaaacacaacagtttatgccttataagaaatagaagttaaaaagaggaaattttttaaaatgaaaaagatgacacacatcaaagactctattttcttgttatataaagtgttgctgtcaaaaactctgataattctaaatttccttctctaataagtcatttgctattttgcttaggtgcccaaagtatttttttctttttattttaaagtccggcaactttactagaatatacatgaagatccaacatagaaataattgaaagacctgacgaagaaaaccgaataactagaacaaaacaaaatacttaaaagtataactccaggaaaatatccttattgaagctacttgttaaaagagcacactgtatacctaagaatattaacccagaatgagcggtaccaatgtgtattctagtaaaattgctggactttaaatagaaagaaaaaaattactttggacacctaagcaaaatagcaagtgacttattagagaaggaaatttaaaattatcagtttttgacagcaacactttatataacaagaaaatgagtagcatctttaagatactctagggaaaaatatattatcaacactcaaataattcaaggaatatttctccagtgacccctctctaaggaatttactttaaaacaagcttcggacaacgaaaatgactacagaaatagcaacataatgactggtgtgagcaataaatataaatacttacagaactatgacgaagtaagggataaagaggaaagagaagcatatgtaatggctatctgcccggggcagctatgtgtagtacagtacacaaaatcacaggagaatggaaagaacatatacaaaaaaaagttgaatgctctcaatttttatattaattatggtggtagtagtaaagattgtgactctaatactgtgtgtaaggagaggtaaagtaaatgaataattacaatatattctaattcaactatcacatgtgtttctgagagacatggttctcagtgtgaaaaaagaaatgcagatatgatatacacgaggttaaataaaaagtcctgtcgtcctgaatttgagttggaaatatcaatatgaactcatgatgtaccttgtgatatacatatgtatgtgtatttcatatagatgtatgtttatactgatatacatatatgcatgcacatatatatttcctagctctgttcactcaaaaaaatagacaatcaccaacccagtagcaaaaagcttccatagcacccagaatatgtacttaaaataccttttcctactaagagaaatcagggcttttgaggaaacggttgattccaggtctggagaagaagtattttgtcatatcatatagcaaagaagctttaaaagtctactagcgtcatgtcaaaaggacctgggaggctaccactgaccaaagacgtgatcatttgagctttcagagaatagtaattgtgaataattaaaactgaaaaatatgtttaaattcatggattcataataatgtacaaacagttaattggccagcttcagaggatgatagagaaccaattcagtatcttgaaatgtatacataaggagaaataattcagcatttattctgcattttctacatgaaccatattactcagtaacccaaatagtagattgggggaacatctttttataaatatattccaactaatgtatgaggaaagaggtaaataagtagaataacattattttgcaacttgcaataaataaatggttctaagcattgagctttgtttgataagtgctaacatgataaaagagagcaataatcagacacaaagtatctcctgatgaaagaacatgacctgtagtcttgcaaaaggatctagttggcaatttgcaggacagagaacatgttgaactgccccatggagaaggagtcagcaaaattcagaatctgggaaatgctgcagtcaaatagcccagtttcttcaaaacgagaaaatatggaggccaggcgtgatggcttttgcctgtaatgacaccactttgggaggccatggatcacttgagcccatgagttcaagaccagcctgggtaatatagtgagacctcatctctacagaaaatttaaaatttagctgagcatggtggcatgtgcctgtggtcccagctactctggagtctgaggtggtaggatcgcttgagcccaggagatggaggttgcagtgagccaagatcatgctactgtactccagcctcggtgatagagcaagactatgtctcaaaaagaaatggatgaattattatatttgcctggattttggtcatgatttttatttactgggacctagggtgcccatcaaaatggctctgtatgccacagcatccatggcatttagttcagtcagtggatgtggatgaaattcaatgctatggatctgaataaaaattgtacaaatgatccacatgaagcattgagcgctcttccgtggtacaatacacacaggcctccaaactgaggcagatccttactgttgtgattaatagtgacgatcgagaactttcctttgtattatgctttatttctttgcattgaattcagcagatgagattgtttagcaacagtaataaaaccaggacaatcattgtctagcctattttttttttagcgatgtactgtttattactaattgatttgtttcttcttggagggtgctacaatgtgcttaaaatgaaacccagtgcttaatagacttttctgtactcaactgtctataaccaatcagtattttgatatttgtgggttctttatacagtttagatatgaatgagtattaaactatgttttcagtatggggtatgtgtaagaatgagataaggcagttctttttttttttctttcataaatgagtattaatagaataggtttgtttgtttgagagaagaggaaagaggcaggtgacgtccctcctctgccccccatcccagatcctccctggggaccatttgatcatcctacagctccatagggcttcagagaccaaggcagaccctcagcaggggagatatggggacctttagattgtctgctcagcatcaagccagcctcactgctagtctcactgtgaccttgatcttctctccaaaaactgggatttttgtcctgttgcttatgacacagtctctctctgcttcctgaccttataaacactccagttactaggtttcccttatgacactgccttgctcccatgtcctctctggggaccagagcctcaacctgagcaccttctctcattggctgacacctttgatcctgcacagcccatgctccactaggctaagcgactgcgggggccactgcaggactttctgggatggagggtccactcacctcagtatagtgaccatactctcacctgtcccctcatagtggcctgcctactctttgggcctgagcaaccttcatatggtctgtcctggctagaactgagccccaggctcagggatttcaaaagaaaaaaaaaaaacactcaaaagtgttccctagagatttcctggggagctgagccccttttcaagccttgaacttggactcagaagatctacatttagttcctggctagaccagttatctacttcgtatgctgcagaccagccactcaactcctctgaacttgaatgtcctgatttttggagggaacactgtaactccactcgcagcactacaaagttgcagcaagcataacggcatttcctgcatgtgtgaaagcgcagtgactggcctatattaggtgcacagtaaacactgagaggttttcaccccttttgtgagtggagattacctctcaggtgcctgaggtgcagcctcccaccccaactccttacccaggaagaaggacaaaacaagtcaggaagcacacagcttctacctggggatcaaggctcaccttgactcctcctgtcccctggaaccactcttgctaactctcttgcctctctggttttagacctgctcactttgatccacaaagtggtgcccattgccttccacttcagcaacacttttgaaaatcaacctagcatctgcctgtcttctcatggttctgactcaacctgtcttagcgtagagctgatctcatgtctaccctacctgaagtacctgccagattcttcctgcttgaagcaagagcctaccccttgggcaaggatgtggaaataattagagtctgtccccagcaagcctcagtccagtgcacagctaagagaggtcaatagtgtatggagcagcttcagagagacactatagataaaacagaataacaagagtccccttatgcaaagtcacaggtacccacagctctggtgggtcaatcatgaaaatcagactctggtattaagtaaggttctgaaaaagacaaggtgggtccgggacttatgtagggacaatctgacaaggcttggaagtcttcaaggcagaaatctgggaacggtttaatcacccccaaaggacccttggaccgagaaggaggaaccctcaattttggttccttctccaatactgataggctcagaaaagtcacttctccctaaaatgctgtttctccacctggacaatgaggtgcagaagactaatgtacaagtctcatcgagtattagattctcttgagaatgctttttaaatgtttcaagtattgccttctcatccccacccaggatctactaaatttgaatctccaggtccctagaatctgtatgtgaaaggtcctcaggtggtttggaaaacactgaattcagagattgccaaggtcccactgtgctgtgacattctctgatgactacaggattgcagacagtatgaacaaagggaaccagcagatgaagctggagcagcccacacatgagaagcaggacagccctcgcacaatgagcaatacactcagaaactccacacccccagaggcagtgctggtgggaatcataaattgattccaagcaactctgggcagatttatgagggtcagagccatccaaggcagcgaggaccaccatgccttgaaggctgctgggagcaacagaattctggcaagataaatcatgggtctgacacaggatggcaaatcctctcttcccacagaatccactttagaaagcgttccctctctaggcccatccgtctgaaatcactgaaaatcaaaacaaaattttgtgtatggaaaccactggagactaatgtatgtccactgaattgggaaagtacaggtcccttttattgagaaatgaccctggagtccctcctttatgaaatggaggacataaattttgagattggatatctgcttcccacagtgaaaacttgaatgcaaagttacacacgttttaaactgtagtcattgtgcatctctaatgctgaatgttgtactaagcactttgcctaggtcatcgtctaattctcacagaaagtctaggtggtatgtcttacagtctccaattgttcacattttaaaaactgaggcttagagaggttgtacaatctaccttatgtctcacagctggccagcagagacatccagaatgagaacacagcctatctgaatccaaagcctaagcccttcttcctccctcaccagatgtctcaccttgccagaagtagaagcccagcatctctgggaatatttcagaaccctcagaataaactaacctaggctgaagtggttcccactgaaggtgagatgctcaggtagtgtgccaagcccatacctttagatgtcttccctagcactctattgagaagaatacacacacacacatatatgtattcatatatatatatagagagagagagagaatatgtattcatatatgtattagtccattctcatgctgctaataaagacatgcctgagactggctaatttataaaggaaagaggtttaactgactcacagttcagcatggctggagaggcctcaggaaacttacacttatggcagaaggggaagcaaacatgttcttcacatgatggcaggaaggagaagaatgagtgcccagtgaagggggaagccccttacaaagccatcggatcttgtgagaactaactcactatcatgagaacaggatggggaaaacttaccccatgattcaattatctccatctggtccctcccatgacacatgggaattatgggaactacaattcaagatgagatttcggtggggacacagccaaaccacagctatctacctatctatctatctatctatctatctatctatctatctatctatctatctaatatagatatatgtattctttcattttcagggttgaattaactaaataaactgccacgcttctgccctgtgattgataaggccacccccacacccaggctgcttgctgtaaggaaagcctgggtctgcagaacaggtttcaaggaactatagataaggagaggagtggatttcacaacttcttttctggggttttatttttctccctgcccccatccctcctccccaacccactgactttaaattcccaggtgctgttggcacgggatccatattcacagcaactcccctggccacatgtcctgctgtccaggacagcaccagccttgggtacaggcaggagtcaaggacacactcacatgtttagagtttgggacttagcagcgaaatttcctacccctttgcttcttttaatatgtcaatccagcctcttttacagacaaaggaactagatcaagatcccctaatcaataaatgatgaagctgcccccaaaccctggtgttcatgctgatttcaaagcctgtgttctttccacatcacccctcgtgtggtgacgtagcacagcccacacatatattttgggcacaggagtgagtaaaagggcagctggtcaaactagctctgccaaaaatgcattctataaagagtctgaattagcaggtttgccctctttataataaaaatagaggatgggcatggtaattcatgcccataatcccagtattttgggaggctgaggcaggaggatcgcttgagctcaggacttcaagactgcagtgagctatgattgtgtctctgcactccagcctgggtgagagagtgagacccccatctcaacaaaaagttttaaaaattagctgggcttggtggggtaggtctgtagtcccagctactcaggaggctaaggcaggaagattgtttcagcccagaaattcgaggctgcaggaagccatgattgtaccactaccctcagcctgagcaagagtgagaccctgtgtctaaaaaaaaataaataaaaaatcaggaaactaacaatcagccattcacacccaaagtgaatggctccattaccttctagcccctgaaatgaccatcctgaaaccaaatagaaataaacatcttcctttgcaaaaaataaataaataaataaataaatgaagcccagaaaagtgttgaggactccgtgctgagtagcatatgcattagaaccccacccagaacttccacctcccagcctctgggccagggcagcatgacaaaaacccacgacaactggcccagttttcagattagcaaccctgcccatggcagtctcaatctattgcttataatcggcaacccaagttaacctttcacatttacgtaattaaattagtgcagtcttcaaaatgttttcactttaatgtcttagcaaaattatgcatgcccaaattaatgtttccatcattttccttagactagaacttaatctctcttttaagggaatttctgcaatcttatgagatttttgtattttaagtaaaagtagtttatcaacaacacctttttaaaagtttttataggttgtaaaaatgttagaattttggccaacatgagatctgacaactccccaaggtttggtctggctcaaagatagaaagtttgaaaggaaatggcccgcggggggtgggggggtgcagtttgtgctgagtgttcctgtgttgcccccagaaagccacctagggacgttgggtgggacacagaacaccaggaatgggtgagggggagctgggaaaaggaggagcatgcaccaaagacaaagttgacctgtttttccattttttatactctgttgcttggagagcctgaaagctgtcttcgttgcatttccaaatgcaagctggttttaataaggagcctgagccctgccttgctgcaggtctgttagggagcgtctgacaggcaggccaagccatggccagggagtgcagggcttcctgctcccaccaccagcctgggtccctgagccaatgtagcatcaccgagctttcaattctctttttcaattgtctccaagctaagaggctcctataggcaatgctgagcctttgggagcaggttagttgcagtcaactatagcacagattgagcacctgttgtttgcccagcaccgtgctaggctcggtgagagactgggagaggacccagctactgcctacgcctgtcccacctgcaggggccttctccccttcctggaactcccctagcgcagtgttggctgggccctcctgtggcttgctattcttgctgtcctggcctccctttgggtctctcatagtagcctgtaagctgcttaaggccagggtccatcttaagtctgccccatctttgtctctgactcagggtctggcacatagtaggctttctgtggaagtttccagttcgatggctgattggtgtttcttgccctgaccttggtgccatcttggatggagggtttggggccatggagcagatatctcagaggccacccagggaggcccctggaggagggagggcctggccacatgagtgactgcctctcctcttgtgccacagttcattggctgttcaccacatgtggggccagcgggccccatggccccacccaggcacagtgcaacaacgcctaccagaactccaacctgagcgtggaggtggggagcgagggccccctgaaaggcatccagatctggaaggtgccagccaccgacacctacaggtgcgtatggaagagggggaggggaggggcagaccaccccttccgaagaagcctggagtcttgcctatgggtgcatgttcctggggtgcccaggcatgtcaaggttcaaaggcaacagactcaggcccatagggggtataaaggttggagatggggagatttgggagagtgaaatatggcaacaaaagaagatgtgtcctttgtcctcaagaaactcacaggctgttcgtggaggtgatatgcatgcatgagctagcttcagaattattgctaataaggataattatggtggcctgttcattgaatattgcttaatgctcttcaaatgaggcatgcatgtaaaatgtttgggaaacagaagcacaatgcacctgaaagctgatgctcttatccttgcgcctcctttcctgggccttcactgttggtaagagagcaaactgttctggaacgctcctcccagccccaaccctaccccagcccccagtattcccttagagcagagccaggctggaacgagatccagctccacttggccactttgaggccatggcattgaatgaagctaatggtaagactggagggctggtggagaccctgattgcaagaccccctcctgcagcatctggttctgcaggtctggagtgggggctgagaactgacatttctaacaagttctcgggtggtgtcaatgcagccttttagaacctctgagctcgatcaagtcttggacttaaataaacctgggtggcccccaaacgagctctatgactaggcaaggccagtgctgccatcctcgttttacaaatgaggacactgaggctcagagagtcaggagcctccccacagttacacatccagaagcagcctccacctccagagttctggggcagggcctcccgtggctccaccatggagcatggcagggcaggttaaaaggaaagcaaaaccactatgccttgtgggaacagtgtcccccagggctgaaacaataggaaatgagctcgcctcctctccccgcagcctccgggatccacaacatcctgggcctcctgggaaggagagggacttctcaagttgccctgttttctctctccaggttaacatttcttgtggcagccccatccctggggcctcagggtaaatgtgttacggggacagccctaagtgctttttaaatggcactccgggcagaaatgctataacgagatttggctacaatcagattagctgctacagtgcccacacacccccagtaaatatcccggaagacaccggaccacccctggccctgctacaccaagcaagccagacctccccttcctgctgagccaagcctccgtggggcccagggcggggaggaaaggactcctggagaggaggagaggaatgcttgctaaggacccacaggtgttgctcctgtatgagcatagggtgggtagcattattattggtgttcccatgtttccaagggagaactctggagtcggaggagcttagcaacacatgtaaggctgcacaatcagtgatggagctgggattcaaacccagggtgctctggctcaaagtctgtgttgtttctactaaagcccatgcctggactctgggaggcatgcagagggcagaagggacaggaaaggaaggagggcataggaatcacccaccacccacctcctggaagcctctggaaatgagaggctatgagaggggcccagcctcctgaagggatattgggcaacacaccccgtatacaaaaagcaatatgaagaagaaagcagaggcgctgggaggcgcacaggaaacccaacagtaagcccccagcggagcccattgtcctacccctgcccagggcaactccaatgccagcttggccagaattcccctgctccctgtcccacagagggggacaaactctcaggagatcccttgaatggggattctcttgggctgtgttcccccgagacagtgtgaatcaagctcacttccaaacttgcacaggtcagctaatctcttgagactctgttttcccatctgtaagtggcaggggctgtaaaggtgacatatagtgcctggcacaatgcttacacgtggtgggtgctccctggcccatgggtggagaaatcagctgaagcaatgctgctatgcagcagcaggcagcaggcaggcagtgtttccaagaacacgccgaccccatacgcggtagtttctgacttttcctgtctccaaagacttttctctgacttcctcagatgagccctgtattctgaaaaatttggactgccagatgaactacacttattaaataataattaattcattttcccatttattattaatcacagccatatctaagtcgagtcaggtttctgatctgcatgaagtgccacattatttccacagtgcattcatagaatcccagccaaaatcagaaagctgtctccactcatctctttgaaatattgagactgaggccagctccgggccccagcactgtctggcgattttgcctctgttgaagcaggacatttcgaagtgtccaaattagtaaaggaggcattttggtctggcctaagataggaccatatcaaaatggaagaaccaaaaccaaaagccgctcagttggggtttttgtcactgctgtttttgagacagagtcgcgctctgttgcccaggctggggtgcagtggtgccacctcagctcactgcaacttccgcctcccaggttcaagcaattcccctgcctcagcctctcgagtagctgcaattacaggcatgagctaatttttgtatttttagtagagacggggtttcaccatgttggccaggctggtctctaactcctggcctcaagtgatcctcctgccttgacctcccaaagtgctgggattatagatgtgagccaccacacccggccagtcactgttgtttttgaatacttatattttaaccaaataaaggctctaacagatattcctgaccctcacctcctccttggccttggaagagactcaggtcttagatgacctgagtctattggtcacataacttagtaatctaagaagcagacagttaatgatttgatttttagaccacttcaaaatgtccccaagtcagaatatgactgagaagtcagcaacctttctctgaaagactttttctccatagtaattattactatttaataagtgcagttcatctgttgaaaaaaacacaagatgcaccagaggacgtgagaaaaaggtgcttggaaacagaaaggtgggagccgagccctaacgaacccacccatcctggaggcatggctgccaccgaggcctggcactgggacggctccactgacttctctgcccactgctggggaggtgaagggaagggagcgaatgctaccaagccccaacttcatgccaagggggggccaccattgcctggggcctcctccaggatgtacacagttggaaacacccccactcttagctggtaacttatcctgggcccacctcccaccctctacagctttgcccacctccacaaaggaagaggcccagaaagagggagaggaagggggtgcggggcaggcaggagaagacagcaggctggcatgggggcttgggtgcaaccctggaacccccatctcctccacccaccatgtcctgccttccctgccctggacttaccccttcctctgagagctgatgcagtctgtgtgtccaggttcctgggcttcattctccccctgctctgcagatctcagtgacccatagtaagcaccaattaggatgctgtgcctgacaccaagtgtgcaaaggtgatgaagatccagccctgccccagaggccctgctgccagtggtggtggtggtgtgtgcacaggcatctccgtggggtgtagggagaactacagtggaggtttccacaaggcgctgccgcggaggccgggggaaaggcgctgccgcggaggccggggtaaaaggcgctgccgcggaggccgggggaaaggcgctgcactcagctgagcttgtgaatggcttctgccaggagaggggcacctgggttaagttcgaaggccctaagcattgtctacaaaaaagcgggtggccagagcctgcggtgagcacaagaagtcggtactgccgatgagaagtcgggcaaggctggcctcggggagccgaggctggaggcagcagggccaggtcctggggctgcagtgttaccccccaaaaggcctctcgctccccctggtgaaagcatgagggtggaagtgagagaaacggcctggaggtggggagagcagttggaagggagtcactgtcactcaggccatggtcaaaaggactgagccaggacaggggaaagatggcaggggagggtcaggtgcaggggacaggcccagaggtgctcaggaggtgggatcagcgtaagttgaggactgagtgaatgtggggtcgggtgcaacgctgggactacatccacgctctggcatggactgaggaagcgaggacaaaggagcgcagccactctcccacgagcttggctgagaacaggcaaggccagggcagcagcgagaggggccctgatcaggaggcctctgggccgtggtgctgagtaaccatggtgtctagagggtgggtggctggagcggatgggagagtgggaggccactgcagtgccatgagaagaacgtggattatggggtttgtgctggggagggggacagcatcctcgtgttgtcataaaatggagacagatgatggcacagcccagctctgagagggctgttgggggactcagtgagagcccacgggtggcctgccacaggcagaggcgccagcactcagcccagcccgccccctctctctccctgacttctttcctccttcttccctctctccccctccagcctgcctgccttcctacctgtctaggaccagcatccttctcagcccgcagtcctgcccccatctcctccccacccactaccatacacacacagatcgtatataacaccatttgtcaagcatggcccatagctcccgaaggcagtcgtcccacagctcacctgctcttcagacataatggacaagaggccccaggtcccagctggagccaactgaccttgggccacagctgttcctgatggtctctgtcaatgacactcatttcctcacctggggcaccagcgtgtgcagccggacaacgccatcattcaactccacaaatagccatgaagccctactgtgtgcagggcactgagccatggagccccaactgtgtgcaaggcactgagccatagagcccctactatgtgcagggcactgagctatggagcccctactgtgtgcagggcactgagccataaagcccttagtgtgcagggcactgagccatggagccctgctgtgtgcagggcattgagccataaagcccctactgtgtgcagggcactgagccatggagcccctactatgtgcagggcactgagccataaagcccctactgtgtgcagggcactgagccatggagccctgctgtgtgcagggcattgagccataaagccctactttgtgcagggcactgagacatggagcccctactatgtgcagggcactgagtcataaagcccctactgtgtgcagggcactgagccatggagcccctactacgtgcagggcactgagccatggagcccctactacgtgcagggcactgagccatggagcccctactgtgtgcagggcactgagccatggagcccctactgtgtgcagggcactgagccatggagcccctactgtgtgcagggcactgagccatggagccctgctgtgtgcagggcattgagccataaagcccctactgtgtgcagggcactgagccatggagcccctactatgtgcaggacactgagccataaagcccctactgtgtgcagggcactgagccatgaaaccttgctgtgtgcagggcactgagccataccgctccaactgtgtgcagggcactgagccatggagcccctactgtgtgcagggcagtgagccatacagccccaactgtgtgaagggcactgtcccatggagtcctaccacgtgtcaggcactgagccataacactcctactgtgtgccaggcactgagccatggagccctactgtgttccaggcactgactagactggtagaaaggcctgagactctggagcctcacagtctctggaaagaccacaggacagaaaagtttaataacagtccacaatgccagtcaggttctagacaatagtaggagagatatcacaggcatgattaattgccaaagtaattgtatggatagccatcgctataaagggcacagaccagggaatgtcagagatggaggaattaggaaaagatggatgggctgcaggcagaattaagtttgagttcaacctccaccaccgatgctccatgtgacttagaaagttgtcttccctcctctccacaggctccatctgcagagcgaggggctatagagcgaggtcactgaggtccctgcaagctcaggtgtttcaaggcacttagggctacactggccaggaaggtgctaagggagaaacagaccatgaaccttgctcactgatgcaacaggagtggaacctgggccggccccactgagaagcacctgcctccacaattgggcccttcaaccctgactcctatctggataatacaactatatacctgatcagaaatctcccgctgaccaagctccgtccacactcacacgcgtcatgtgtcatcacaataaccctgcagggtgggtaggacagacctcaccatcctgatttcacaaatgaggaaactgagaaacgggagaaaagggccttgcccaggatcccacggggagttaaaggcagagcccagagcaggatgccactctgccgctcctccagagggtgtgccggaaaggaatggggtgcttctgtttttctgagcggcagtccactctctcccgcaagatccccccgtgtgtgtggacactgtggatgtgctacacaccagctgtgctctcatttcaggatccggcaggcagcctctttgatttgctgctaattctttatttaaaaaagattcacaactcaattacatcaggtaacagtttctaatacaaaacacaaacccaataaacatctcttctgaccaggggacatggatttagatgaggaaaaaacaaaaaattacagcatcagctcattgagagcagtatcttgtaatttccagtaaattggaatcactgcaagtcattttccccacttgagtggcaggtatattaatttcttgttgtttctcaaccatcagaaataaattgtttacaagggatgggaagaaagcttcagagagacaggctgaggctattatcatagcatgagtttgtgtaacgtgattcacagggtgcaggggtcttcagaagagctaaggctgccctgtgctttacacagaggtgggccctgggtgaaactgaacagccttgaccccaagcccccttggccatgccctggttcgcccacttggtccccttctgcctcccagaagtcacccccggaaaaggagtggacaggctcacccatgggggcacatgatgacagcagctgccatttgtcactcactggctaccctctgggctctgaagtaggtcccttataagcatcatctcatttaattatcataacagccttccaaggtaggtattattatcccctttttatacatgaggaatctgggctcagagcgggggtaaataatcacccaaggtctcacagctagtgagtaacactggcagggccaggactggggagaggtaagcaaagcaccttgggcagaaaatttaaggaggtgcttcttcttggggtcagtcgagtgcaaggtcctccctgggagggaggcacctcgccgggctcaacctactcctggccctgagtggcagagctgggatctggatccaggtctgtctgcattcaagcccttgcttttctacctgtggcacatcccactcctaaggcaatcagtcctgtagtagcaactagaagcttccagaggagtgaagctctaatggtggaatttcaggcttcaggggactgatgagggagctactccttctaggactcctgcaattatttcaggtaggcagctgcctgctccccctgactttaagccagccccttgtctgggttggaaatgtggggctgaggccaccacccaggaaagtacaacccagccacagaaacctgcttgccaagctctgctgtctactttggaatctagagagctgaccccagccccgggtctcgccttgtgctttgcatgggtttgcagtcttctcaaattcgctttgtatgcccatgagagcaggggttcttgtcttcattttcttcctcagtagtggacgttgaggctctgagaaattgaccatgttgcctcaggtcacacagccagaagaacggggacaagaaccagcagatgacttggagccctgggctttttccatcccaccccaccatcaagaactaggtcaagacatagatggggctggctctcagatgtggttgaggggagcggggtgagaaaaatagcaaagaaggcttaggaagggtaaaaggagtcaggaacaaacaacgtctaaaatataataatttggctaaatttaaacatacgaaagagttcagaatgattcataatgcatggttgatgcaaatgactatgcaaatgatgccaaaaggaatgggcagcatgacgcttacctctcaaccacagcaggagtgggtaggatgaggactttgtcctgggctgaagttttccaagcaaaccacatcttcaggtggagatgacttttttatgcagcctgaccaggactcagaaacctggggcagtgagcaggacagagttggggcccatccacactgctgtccctagactacaggaagccgccacatcgtcccctgcccaggttcactgagctaaataatgctgcttcctcttacctttcaccaataagccttcctttttctcagccttttaattattgttatcaccttgtccatttctcatggatcaggagggagtgtttggctgagagtctgggaattaggaggggcaaatagcttctcagacccctctctttgtgcatcccagcagcacattggggaggaaatgacctctaagaggggatgtgcaagggtttggaccatagccagccactgactggctgtgtggcctcagatgagttacttagtccctctgagcctcagtttcctcatttgtcaaatgagattaataacatttgccgtttatggctattgggtgatgccgtgtgcctgtgagcatgcattgtgcctggcacattggaggatgctggtaatcagcccacagccctctccaaacctacagccctcagcttccccctccatccacctgctgcagccagacatacttgaggctccctgcttcttcacttccgttcacacaagccccaattcccaccacctctttctgcttgtctcagagccctacccatctgcaagctccatgtgaagccaacatcagccttcctcaccccatcaccacaccccacaaccacctgtcgcaatcccccatctccctcctggccctaagcacctgacgacccttattttggccagagatttgcagcttccccggggctttcacccatgagctccttttgttggactatcatgttgtttggaatgaaaatgattcttctcttactaggaaaggggctggggctcagagagggcacaggggcaggaaatggccccacctgatcagggagcccgggagcactccactttgcctcctcaacatagccaccctatggtgagacttctcttttcatcatgaagatcgtctcctcagtttctttgtgagctcttgaagagcctggagctatctcaggttcacaacgccttacaccgctcccaacattcaataaactcccatcaatgcccaggcactcaccagggcaatgggcactagattctccatttgcattccatgaagacctcagttccttgcctgccatgttcgcaaacagcctctgcagaagggccgtgggctctgccttgtgagagctccgggaggcccctcacacacttggaagaagggacatttcctggaactgtagataaaggagctactatgtgcacatgggcaaaactgccttgcatctcttcctggttttttgtaaaagaccttggatctgaatacacatggatgtgaaagtctgccgagtcccataccctggcagctggtccctggggacacatttgttagctggtgcgttagctgtcttcaagacatgccgctcttctgatatggttcagaagagagttcttttctccccatccttgcttgacttcattgcagcaacctaagaggcagcagaaatcatctcccatccccacactctgtttttattttcatcatgatgggttgtttgtttgcacacatatttctccaggaggagttaccagtgagatgggaatagacagtcggctcatatacactgctctcctcagtcattctgtgaggaacctccttgtttccagaccccatggggagactttacaactttgtaccaagtcaattatggctactaccgtcattaataataataataattaactaatactaattgagtgcttattacatgtcagccacaattctaagaccacatgtcttaatttctttaatcctcatagcacatgtaggctaggaggcaagttcacttattatccccatagtatagatgaggaatagggaagttacttgtctaaggtcacatgagtccattgatctgggacaaggagagaaaaccataatgaggaaatcctaggtattcagaaagccatcaccccaatatgccacattcatatagtctcctctctctctctctctctctctctctctctgctgtttccctctctctctcccctccttctctcccttcttccctccctcctccctgcccttttcctctctttctctcttgcaccctttactagtctttcaccttcttagttctgtgactgaggcaactccctgtccctctctaaacttgatcgtcctttcctgaagtgggggagaagaatccctttctgcagggactgatatgggggagaaccctcagaccacgatggcgatgtgcttagcccactggaagctgctgggttggcaggaagggggacagtcttcataccacagcgggagccaacgttctttgtcccattgcagcatctcgggctacggagctgctggcgggaaaggcgggaagaacaccatgatgcggtcccacggcgtgtctgtgctgggcatcttcaacctggagaaggatgacatgctgtacatcctggttgggcagcagggagaggacgcctgccccagtgtaagtgcccagagcaggggtttctcgtctgcactctgtcaggccccgggaaggcctcttggaggcaccaacactcaacaccctcctcctggaagttcataccaggagaatgagacagcaaagagtaattaaacagcagctttgcaaactcccagcaccccagtggttcacctcttgcctgtgctagggggaggcaggacctggcagagctggccatcctagcaggaactcagcaccctgccaggtgaatctcctggttgggccaggctccccccctccctcacctgaagcacagcttttgcttgggaaaaggggccaaagcagacagctatgttctagcacccaggacccccagctccttctccagaaacttatttgagaacatccttggcagagagatatgggaagaggggctaccgagaaagcagtttacttccacaaaataaattcagggctcctaagagccaggccctgggctaggagctgaggaagcatgaaaagtaaagttcagtttttcccttctgctccttcggggttaaggtgaaacgacaggagtaagcttagcaagtgcaaccttttgcataaaaaatgtctcaactccaacttttatttagcaactataattgggactttccaacctaatataatatattaagccattaaattacaggctgctataattttcacgggaatttattgagtgctaatgtaattccttcatctaagcagaaagattgcattatcttctgcaagggactttcacttgattggactgtaatcagttatgtcttttcacgggaccgcgtcttttttaaaaattcaattgaaatctagttgttcctcggggttgctgcactttatcatttttattaatcaatctactagctctcaaactttgtggatgcacaggaagttcccaagcaggcaggaggaggcgattctgggccaggaacagagggcagctcactctgctggttgggcaaggcatagcaggggcatgtggggagagtgactggtcttcgctgtggcttcacatctccacctctgaggaggcacttggaaagggggaaaaatggcggttgtcaggcactacctccatctccagttctcactaggcagaaaaaatggtgtctagacacaattctcaagataatgaagtggactctaagaattaaactgcaggggccgggtgcggtggttcatgcctgtaatcccagcaagttggaaggccaaagcgggaggatcacttgaggtcagaagttcgagaccagcctggccaacacagcgaaaccatgtatatactaaaaatacaaaaattagccaggtgcggtggtgcacacctgtagtcccagctactcaggaggctgaggcacgagaatcacttgaacccaggaggcagaggttgcagtgagccaagatcgcaccactgcactccagcctgggcaacagagcaaaactctgtcgcaaaaagattaataaataaaaaataattaaactgccggatgtggcagctttgctggttcaactgcacatctatgggggcagcggggagttgcccttctatgtacccggccacactggagctcctgtgctggaaatgggctccagctgctagaatcctccaccccacccccaaacacagcacatgtgcacatacacagccctccgtctttgcttctccagtgcctcccaaacctcgcctggtggcatgagtctaaatcaggctttctcaacagtggcattattggcattttggagcaggtaattctttgtggctaggggcggggatctgtcctgtgtattacaggatgtttagcagcatccttatcctttactcacttggtgccagtaacagcccccagaaatgacaatcacaaaagcctccagacacttccaaatgtcccctaggaagccaagtctgttctaaatgttaaattccaccattaccatcccctgcaaggcaaatattgtgaagagccagcccacaatccagacagcactcaattcattcaaatttatttaaccaatatttattgagtacctacttaatgccatccctgttacaggaacttgggatatattggtgaacaaaagaaagatctttgctctcaaggaacttacatctgaggagagggagggggaaatatctggggaaacagtgaccccagcaaaggccatgtcccagaggttcatcgatgctcaaggaacactcgggctggaggagagggagccaaaggaagggtaggtaagagataaggcagaggtaatagggctggatcaggccactttaaggcatgttggagccataggagggttttgaggcaaatggtgacataatgtggtatgtgtgttaaaaagctcactctggctgcaatgtgaagaatctaccatagaagaatctatggacacaagggaagggtcaagacaatgaattcaagggctatggcattaatcctggcaagagatgatgatggcttagactaggattgtaacagtggaggggatgaaaagtggttgaattctgggtgtaatttgaaagtcaaatccaaaaggattttctgccagattgaatgagaaattaagagaaagaaaagagtcaaggatgactccaaaaattgtgcctgagccactggaagaagggagctgccatcacctgagttagggaacactgtggaaggagcaaatctgggggcaagatcaggagttcaatatcagacatgctgagttgtagaggcctggtagacagccacaggcagacaggtggacgatgggagacaggccgctagagttcaggagagaggtccaggctggggatataaatattggagaaattagcataaatttgagacaggatgagattgcctaggatgcaatacggatagagaagaatgtgaagaccgagcttaagggaccctcaacatttagaggtcaggaaaagaagaggaaccagcaaagcgggacaaagaagaggaaccagggaggtaggagaggatgcaagaggatggggagtcctggaagtcatgtgaggaaagggcggcagctcctccaaatgctgctactggtccagcaagagccttgaccgctccccacccccacctgatctaaaggagacatcagaagcaggggtgcgggggatgagcatgggtcagaaaagatctttctcttgttcaccaatatatcccaagttcctgtaacagggatggcacaaagtaggtactcaataaatattggttaaagaaattggctctaactacaggaaagcccatcctcaagccccactgctgtctcctccccatcccagcaatctctggatctgttcatgaggggagggcatcacctaggggtggaggtcccactgctgcccgcaagccaagaggggagatggagcagaggccgacggggtggaccttctcagcaccactggttcagactgggcagcccctccatctccagatgaggaggcaagtccagggaggcggggtgcctcaccaagtatagcccagcaaatctccaacagagctgtcaagaacccagactgagcagggtgtgatggctcatgcccgtaatcccagcactttgagaaggctgagtcaggagaatcgcttagttagtgactagcctgggcaacacagcaagaccctgtatctaaaaaaaaaaaaaaatacaaaaattagtcaagcatggtatttcgtacctgtactcccagctactcaggcggctgaggcaagagaactacttaaagccaggagtcagagaccagtctgggcaacatagcaagaccctgtttcttaaaaaaaaaaaaaaaaaaaaaaaaaaaaaaaaagtcgagcctggtagcttgtgcctgtagtcccagctactctggagactaaggcaggatgattacttgagcccaggagttcgtggctacagtgagctatgatcatgccactgcactccagcctgagtgacagagtgagaccctgtctcaaaagaaagaacccagattggaccctgaatcctgtgctctgcccagctgacagctcacatccctcagacccatccccagggccaaccctcagggcacattccctgcaactcacgcctgtgccaggtggcagtgagcagggtctcctcccaggagtctccccccaggccaggacatagctgcacatacatatgggaaatgccagctctctacaatagcaattcagagccttccacccacactagatccactctaagaaatatcaaattatttccatcgttaaatccaaaattccatgaaacaaactgcatctcggctatttatctggaaatttctgtagtactcattgccggcacccctgagcgctttagcgtaagaagtggctcaagaagaatggctgcatccactagctggttacgaagcagcatcgatggaaatgtgatgttttactggctttttttctattaagtgaaagaaaagtcactttcctccaaggtcaggctgatgtttgaagaattcgtctgagctgtggtggccgacaagcaggcgtggctgtttttgaagcaccatcctacttcttcagggattccaggattctgttacagaaatctccagcacaatcctggggactctctaatacctgagccccaaccaggagcatatgtgggcccagaagtgaatctaaattagaacagcagctggctgggcacggtggctcacgcctgtaatcccagcactttgggaggccaaggcaggcggatcacctgaggtcaggcgttcaagaccagcctggccaacatggcaaaacccctcctctactaaaaatacaaaaattagcggggcatggtggtgtgcacctgtagtcccagctgcttgggaggcagaagttgcagtgggccaaggtcgtgccattgcacggagtaagatggcaaaaacaaacagataagaacagcagccatttactcagttcccaccatgtgtgaggcgctccactagatgcctgagggtagtacttgtactacgctcagtaaatgccacaacgacctgtgttgtcttcattcgcagccacactggaagatcagagatcgagggcccctgtcacagtttcccagggtgggtggagaatccagactacctgattgcagggctcactctacaaggcaagcagaggggtgtgccagggattccggagggaaaaaatggaacattagctaggaggaatgagatgtccaaaagggagaactgatcttcccagagaagaactgggaataaaacttgagtctggcctcttgctggtttttttctctcctcctgatgcttcagaactgtgacttctcagaaaacctcgatggctctcagtgagagaacggctctcatagagaatgaagtccactccttgcagtgccttcaaggcctctagccatgatcacactgttccgtttaattctctctacccacctaatttacgctccctccagccccatctcaccacataggacctttcccattctttcttggatctcttcatcccacaggatcgaaacaggtcctggacaatctctctgtcctgatagacttctgggccaaagagacccttgtgcttttcccccacgcaccccactcacccacttccctctgggctcatgccactctctgctcttggaatgacataactttgccccactctctgtgaaaaaaacaaaaacaaacaaaaaaaaactccctatccttcaaggctcaactaaaagccgcctcctacaagcagtcctcacagcaataaaaccttgctctctctctcccagtttctcctagcattttctgtctaagctatccttgtggtccttccctaacactgcccagagtgacagttattggtatatttttctgcctcctcaactcaactgtaagttttttgagagagagtcagatcctgtttttaagcatagaagttctgtctgctgcaaagtggagaactctggtttggccacaaacctaacgtgctttttgtttctacagacaaaccagttaatccagaaagtctgcattggagagaacaatgtgatagaagaagaaatccgtgtgaacagaagcgtgcatgagtgggcaggaggcggaggaggagggggtggagccacctacgtatttaaggtatggtgtgtgctgccagatttccaccaggttcctgtgcatctgcaatgtcagagcctcatgacagccctgggatagaaacacctcagatgctcttatccccgtgtaaagatgagcagggccaggtacagtggctcattcctgtaatcctagtattttgggaggccaaggcaggaggatcacttgaggtcaggaattcacgatcagcttgggcaacataccaaaacgttgtctctaccaaaaaaaatttaaaaattagccagttttggtggcttgcacctgtagtcctagctacttgggaggctgaggcaggaggatcatttgaacccaggagttcaaggctacaatgagctgtcatcacgccattgaacttcagcctgagcaatagagcaagaccctgtctctaaaaccaacaaaagaattaaaaaataaagatgagcagactgagatccagagagatatagagtctgtctgtccaggaaagggtagaactcttctcttactgatacatcagcccaatttcaccatgcacagcctttgccatcctactttcagagagtcccactgtgccctcctggaccagctctctgccctaaggtggactttgctgacatcatcacagccaggccagaaactgaagacagaggccacctgctaggtcctcccacaggactgtgatgctgagggcttaaccttgaatctttgggggtcagagccagagacccctaagaatgagggagagagagcatagagagacctgcttctaatcaccagcatccagacctctgaggccagtctaaggagcttcaggaaaggggctagaggaagtagaggaagcagcctctaagatcaacccccacctcctggtatctatattttgctcttggtatataggtcttgcttctctggttgaaccctgactgatagagaagctggcggagccgatgggctattgtaacaagggttcagagcccgcaaaccacctcagaccactgagaggtcaccaggtcaccccaaaacagcaaaccctcagtcaggttgaatttaccagagcttaggggctccagggggaagcacagctcggtttctcaatgtctgaatgtctcccctggtcagatgaaggatggagtgccggtgcccctgatcattgcagccggaggtggtggcagggcctacggggccaagacagacacgttccacccagagagactggagaataactcctcggttctagggctaaacggcaattccggagccgcaggtaaagcgctgcaagcgtgccctctcccagaacctctcccaggccttcagctgggccccgatgccatcgcatgcctgagggcatcttagtcactggcacctgggatgctaggagctctgaatattggtaccgatatccagggagggagggcaggcagcaccctgggagccctgcaggccatcttgctgacctggagcttggacttgtagaaggtcactgagaaagtgaggcagggagcagccgtcaatcagccagctggccctccctgcaattgttagagcctccccctgagattccttcttcctccaggggcagatgggccccccagttaggatatgagcaggtgaaaaaaatctgggcaatgtcaggcctcctagacccccatggtacagacctccaggccctgggctgccagacccaagcgtatccccgctggaaaatctcttacttgactctccacggctgagctctcctccctcattaatgggagccagaagcacagaaatgtgagacaggcagggaagagagtgtcaattccctgattcctctaaagtcagccacccctaaagacagaaaatgcaattcctttttgtattttcttttccacacaatcagactgtgggaggatcttagaaggcatttaagatttgggattaattaaaacaaatgtgcaaactgtctctcaattgagagacggctagaatagaagagtagaaacagtcatgggtccaccctgaggatctccagtgacgtttgcagcaccgaggcccagcacccgagaaaccctgaagcacctctgcctctgttgcacatgtgctgtcaaaacaacctgcaggtttccaggcagataccattcctgttttacaggagagccaatgggctcaccaaggcatgatgactttttttttctcaacagggccgagctgtttagtgatagagacaatttttgttttttgttttttgtttttgagacggagtctcgctctgtcaccaggctggagtgcagtggcacggtctcggctcatgccacctctgacttgcaggttcaagcgattctcctgcctcagcctcccgagtagctgggattacaggcacacgccaccacgcccagctaatttttgtatttttagtagagacgtggtttctccatgttggtcaggctggtctcaatctcctgacctcaggtgacccacctgcctcggcctcccaaagtgctgggattacaggcgtgagccaccacgcctggccagactcaattcgtatttttaaaacaccgttgttctgattttgatatgggttattttcctttccacacatttgctcgaaggctgcagaacgggtatgggggtcagaaacctcctcagctgggggctgagcaggatgaaagcacagcgcatggtctccgtccatctcgttctgatttatttattacgcgcttactcacagccgtgcacaaacaccagcgccaacttctggcccctaacgcgcctaaggggccttctctctgccacatgacaacagccttgacaggcccacaccctcccctgagagcagaagggaggacagcgaaacaaacccaagctcaacacccacccctggaggtttcatggctaacaaagtccccccagcttgcctgatggcctcgcctcagctctgcttgtccccattctagattcaagcttgttcctgacctcagcttcattttcaaaacctggcttcctctttctagcaagacagtcatcccacctacaggtccctctgggtcccaaagaatctgggccacaagtgcttccagaaaccctgccaggccggttcacccgtagggttccggcagacacacacactgctgtttctgccttccaccatcaatttccaggtccccagcatgcatcatctgctgcagcagaaagggttttagggtttttagaatacctccaccctttcctatccatcagttctgcgttcgtgggattcaaccaaccacagatcaaaaatactcaaaaaaaaaaaaaaagatgattgtgtctttactgaacatgtacagacttattccctaaataatacaataactattacataggatttaccctgtattgggtattatatgtaatctagagatgatttttttataggagaatgtgcaaatactatgccactttatataaagggacatttattttggtgtgatggagggatcctggaacctccacagatactgagggacaactgtagatgtctattcaaatgtcctatggaacagtaggcataggggatatcctggaatctcaaaggttagcagaagagatttcttgtggtcaacctgtggctacattcaacctcggctctgtagatagcttcctttgtaagagcccaaagcagccccaggcattgggaagcacagccctgaggctgcctttgttgccagggtatcgtccacccaccagggcttctgctcctgaccttggagcagttcctgagcgcctggccctggagaacctctaagcaggctgagcccaggtgtgaggctgtctgcacgcgtgtgttctgcctctcgagcccctgacgctccccacccctggcagtttgtggagcatttcgtacactcactgtctcctttgagcggaacatcaaccccatcaggtgggtcttattatccccaagccacaggtgaggaaacacaggctcagaatggggcgttcttccccagggtttcacagacagcaacgggctctctggtcagcctagtccaggattcctgcaaggaactttagtgcaaggttttgacatgtggctgctcaaagactggtgagtcccttttctcgttaggacgggaggcagttaatgaaacgaaggtccagtgctacggggcttggctgacatgaagagaagatagaggaacgagtttagtcgccatgctgcctgtctgcccacgtccccccatccttaaccaagcacagcccctgcttttgagccagagagtactggcaggaagcaggggtacaaggcacgctctcatctgggtgtactcagctgtggccaaacaggtctcctagggcaagcagcctcctggttttcctagtgtggatctgaagcccccaggccccactgaagatgggccccgggagctggagctggtgcgggcgccctccaaggcgtcctgcatcctgcttctctggccagcatggctaattgaaccttgccagcatcctcacgcaggttccctatctcttcccgcaggtggtggaggtggctggaatgataacacttccttgctctgggccggaaaatctttgcaggagggtgccaccggaggacattcctgcccccaggccatgaagaagtgggggtgggagacaagagggggtttcggagggggtggaggggggtgctcctcaggtggaggaggcggaggatatataggtaaagatgattcgtgttcaaggtgtcactccctccctgcttagtcctaggctcctcacctccctgccctgccctcccctgccctcccctggcctgcccaagtgtggactgtgatgtgactgcacgcctccctctcgacctgcctggaccagccagaggcagggtgctggctttcgagccagcaccctgcctccaggcttcctcagcgacagcatcaagatcccatgtgattcttgatgtcccccaaagtcgatgataaagaggctttggcttgccagactagtctctgagtcacccataaggactcccccagcctcccttggatggcctggccaagccagctcctgaaggggctggtttgtggtttcatggactccttactcctgctccctacctcagcccaccagcttcctgaaaggcgccgctgtgcctgctgatgggagctattcccgagggcaactgcaggcaggcttagcccagcccttcagcaagcagctgcccattgaccccagctgcctcgtctgggcttcagagcacagtcagcagagccttctgaagctgagaggctgggagacgatggctccccgctccccacagattaggacgaatgcatgcatgctctgtggtgttcgtgtctgtgttttgcattgacgctgtgtgtaagatgcttgtgttaaccacatgctcttcttttccaagctgggtgggtgggaggagcccgaggggggagcccaaagatagcccagccccagatgaaaggagggacgggagcctcagggcacaggggctcatttcccgcaatccgcacagcccgccacaccccaaccctgacccaatggggctgaagagcaactcttcagtgctaccatcctgaccagtcctgggagaggcaccatgggcatatcccagcctggaaagactagaactttttggactcttgctcacattaaccacttcttagtgggccaccggcagagtgggagctggcctggacctgaggggaaattagccacacacccagcatctactgagccaaatcccacatgcagcctctgtgccctgagcctcccttccctccccgcatccctgcccctgaggtccccagtgaccccctaactttggccagagctgcatgccccactgacgtgtgtgtgtgttaagattttggcacccaccccccatgttaaactctgctctggtttgctactcaggcggcaatgcagcctcaaacaatgaccccgaaatggatggggaagatggggtttccttcatcagtccactgggcatcctgtacaccccagctttaaaaggtagcttctctgccaggcagcagaacaaacttgcttaggtcagtcctcccaccaagctaaaacctcagagtctctgacctgtatccaggatacagaggcacaattatgggtccctggcaggcaagcttcctatggcgcaggtcaccacattttccagaagtcaggatgtgtgctttaatatgaatgcagaggcagaatcctaggaaatgtaacagtaatagcccaatacctgcaccagccaacctaaagatcatgtgcgtgggcttctctccaccactgactcaaaagcaaacatccatagacacccatgcccgctgcctccgctgcactctctatatgcacaggaagactcttctacacagttgtgcttccagtggctatgggacctaggaacagggaccaccagagcacccacagtgaccacctggagacatagtactgaggctgggagtggggaggcaggctcggcccaagactgaccctccctccttgtcactagtgatggaaggccacggggaagtgaatattaagcattatctaaactgcagtcactgtgaggtagacgaatgtcacatggaccctgaaagccacaaggtcatctgcttctgtgaccacgggacggtgctggctgaggatggcgtctcctgcattggtaagggggcagggccaggggaggcagaggggcccatagcctgagatttggcccatgaccacaaatggtttctgggttccagaacaccctggattcggttttgtaaactttctgtccctcccctacctgccacagctcgagtgctctgaccactgtgtgaaaggtgggtcatggctcctgaaggagtcttaaaaatcctctactatagaataagccctctaccacccccaccaaggggccatcctgcctccacttaaacatgcccagtgacagggatcttactgctcctaaggttctctgttcccttgggcagtttcagagctggggacctgttgccttaaccttcctctcctaggtttccttacagcagcagctgtgcatgtgcagtgtttgaagacagtgctcccattctcctcctcttttttttttttttttttttttttgaggcggagtttcactgttgttgcccaggctggaatgcaatggtgtggtctcggctcactgcaacctccgcttcccaggttcaaacaattcttctgcctcagcctcctgagtagctgggactacaggcgcccaccaccatgccaggctaattttcatattttcagtagagacagggtttcaccttttggccaggctggtctcaaactcctgacctcaggtgattcacccgcctcggcctcccaaagtgctgggattacaggtgtgagccaccgcacctggccccatcctcctcctttaactcttcttcagactaaataacccatttgtttgcagcagttcatacaagatgcagttttgtgtctcttcccccgccccaccagtgtccctcttctgcatgtgttccactatcgatgtcccttttgaaatgtagtgtccagtaccaagcacgatacctccgtgtggtctggccagcagagggcacaggacccctccccactgtgagcccagtgcctcagggccacaaggaagtaacttagcctcagagggtgttacttacagcgcaccctgttgtttggtcacctgcggcccccacatctcttccagatccactttcgtttcaccttccatcctcaccccatagttgtgcagctcatgtttcaaaccaacatcccgccactgatattcatccctgttaaatttcccttcacccaaaagctactgctaaaagcctgtcaaatcgggatgagtctggtcctgctcatggtcccctgaaaagaaaagtgtgacaaggtctccagcgatgggaaggagcaagtagtttttgtctcagtgggggaggttatttctgacttgggaccaactcaaaggagacctggtgtggttgtcaataccccagtgggacctgtcttccagtgtcacccaccccggagccacacctgccactctcgctgatcctctctgtggtgacctctgccctcgtggccgccctggtcctggctttctccggcatcatgattggtgagtgcacagagccccagggactcccaagggggcaggaaggcaggactgaatagtgtctcaggctgtgccacaggtgccaaggtgtcacttcgttatgctagtccctggaattgggtggggtggtgattagggcagcccaggccaagccaaaacggaagctcccaaccttccccccaccagagcagctgcagttccctgaggagcccctgattctgcacctcagccccgtgtgtatcctcctggctgatcagggggtggggagctccttcagtgtccatcacgatggtgaaagctcgcccccacccctagacgtcacttctagctcccacatgcttccaccggcgcagctcctgtttggctcccaccctatgtaatgcactagcccactcttccccaaaccagccctccaccaccctccaggcagagagataggaaaatcggtttctgagtatatttctgttcagcctgtgagccaaggtgagctgacctgcaggtcacagagaactcagtgtggtcccaaccagctcttactgctggcagagacatgcccaggacagatgggcagaggcttgaaaagggcagagggaaaggctcttgagagccctcgcaggccaggcccctgcaggcaaagggatctgccggtagaagggagatggcagcacacactgtgtccccatatggtgccatccctcaaagggacaggataataggagctaacacttgttgcatggttactacgtgctcggcaatttacacatttcaattcattcgatcctcaggtaaccctaatctgatcacggtcggtccattgcatagaggagggaactgagcacatagcgggtgactcatttgccctggcccatgtgttggggggctgggctttacacacagaatctacccactgaatcacaattttgttctggcttccatggagtttgccttccagaacatcctcacatgtaggagtgataatggtcactcacattggtagagctctttaggatttttcaaaaccattttatgttggtgaattcatttcattgacaaccctagagggtggggagtggcagtggttagggaaacagggcaggagttaccatccctgcctacagagagggaaactgcagtccaaagaggtcctgtgacctggtcctcatggctcagcttgtaagtaacaagaggcggaattagagcacagatccccagacaccaattcagagatcttttcatgatgtggctcttctccaactctgtggcttggcagttctccaactataggaaacacaactgaccaagatcccagctgcaccctcaaatccactgctgtgattgcactgaagctgccctacccaatggctgagcacagcagaaatactaaggcaggccaattcctgggagtcatgggactcctctgatgactgactttggctccagaaccccttagggccttgctgaaacttccttaggctccatggcacccagggtgcttccacccaaccttccctccctccctcgttcacgtggggttatacttgcaacacagtctgctggttcacccagccttccctggctccctccccatttcctctcatgggcatttcttctaataaaatctgcagaccatattgggtctaatcccatctccagtctgcttcttggaggaaccagactaacatgactctgccctatataatacaaataattattttccatatatctgatttttagctttgcatttactttaaatcatgcttcaattaaagacacaccttctttaatcattttattagtatttctaagtatgatggaaaggttcagagctcaggggaggatatggagatccagggaggcttcctgtaggaagtggcctgtgtagtgcttcaagggccaggctgccaggccatgttgcagctgaccacccacctgcagtgtaccgccggaagcaccaggagctgcaagccatgcagatggagctgcagagccctgagtacaagctgagcaagctccgcacctcgaccatcatgaccgactacaaccccaactactgctttgctggcaagacctcctccatcagtgacctgaaggaggtgccgcggaaaaacatcaccctcattcggtgagcgccctgctgccgtcctgggaggagaggggtgcagtgtaggggctgaatgttatcacagcaccgcagactcctctagccacaaaaggccggcagagccctccctatgggcacccctagccctcctaggaggacaagccttgacattcagggccatgtatgttggcttacattaactcccatagtttatggagtttatacaatgagaggagaaccagggctctcctcaaaattcattcagatgtgctctctccaagtctacctggctccccttccctccaggggagcaggggagcaaagggcccctcctctgagcatctagagcaactgcgccttcctctgtcactcactggaaatactccccagccagtacccacagtgatctgtctctccccaaggagcatgaacctcccccggggaaaagccatggcttatgcacccctgtgtccctggcaaatatcagagactcaataactactgattgaatgaataaacatttgaccattgtcatgagtccctggttggaatccttcttaccagttttcaggtgaagaactggaagcccgagattgcatagcaaagccatgttgagggtattactcctgagtgtgtatgttacccccgcctctcgtgtttgtccactaaatgtgacgcccaggctcaggacccccagctgcctcattattgtggcctgtttgactctgtctcctcttgtcttctcctttgcacaggggtctgggccatggcgcctttggggaggtgtatgaaggccaggtgtccggaatgcccaacgacccaagccccctgcaagtggctgtgaaggtaagaagtggctcactcttgagcctgcccttggcttgcggactctgtaggctgcagttctcagctcacagcctcctcctcctccccaccctccccttctctgcccagacgctgcctgaagtgtgctctgaacaggacgaactggatttcctcatggaagccctgatcatcaggtaaagccacagagagacaccctcaccccaactcccctctgcccccaaagaacctggagaggtttctaacagatcgatatctccaagggaaatcgtgttgtccctagcatgtccccttttctccagtaggagactcccaaacattctagacacttcttaccagaatggaacaacccttgatggttgtttcagaaacaaagtctgtgtggcctaataatcccaccgatgtcactgtctgcaaccagtatccctgctgttatccactggttcttcttccctcactttttcttaagaaatggagcatgctagactttgacagtacaagatataatctccctccaagacccttcaccaatcccagtaattgtgcttctaatatgatgggaggccaccccatcctaggctcccatcagcagggctgagtctcagctggctgcaccttttgacttgaggctccaagatctggatttaagctgagagtctcagtgcctatggctcctgagggcgtccgctgtgacagcagatcccctcaaggagggggcagatatttgacctcaagatcaggtgggggctcatggccccctgtcacactgggaagactctgaacgtcctgacaggtgggggcagactgggatgtccccttggtggaagtggcaggggtaacaaggccaggcagtgtgagtgatatggctgtgaggtctggaaccacaggaggacacacaaaataacatttattttctgatgatacatataattcctgattatgaataaaacttggcaagtatgagattatattgaagaagacccatatcactcaaatctcactacttggtggtaactaaccattattatgttggtgtctaatcacccagtctttcaacacttggggggctgtgtgtacatgtgtgtatgcacacacatgcatgttggcccatgtggaattcctaggccctactgccctgtgtgtcctaaagggatcatgttaacaagaaaacccaagtcttggtccctcccatgaggaatccacgggaaactgatagactcgtgaggccatccccttttgctggctctgtttcacacgctgtcacttggcaagtctcacccagtctctcttggaagcagttgttttgcttcaccttctgcctgaggccttcctgggagaaatcgaccatgaattctagcacccagtccacgcaccagtatctgagaaagacactctcctgccccctgagacacttcctcacccaagtgcctgagcaacatcctcacagctccagccactctcctgcaaatggaactcctgtggagcctgctgtggttcttcccacctgctcaccagcaagattctgggtttaggctcagcccgggacccctgctgcccatgtttacagaatgcctttatacattgtagctgctgaaaatgtaactttgtatcctgttcctcccagtttaagatttgcccagactcagctcagttaattttggttacatccctctctgctctgcagcaaattcaaccaccagaacattgttcgctgcattggggtgagcctgcaatccctgccccggttcatcctgctggagctcatggcggggggagacctcaagtccttcctccgagagacccgccctcgcccggtgagtgagaaccagtctttgctgcagttgttgtgccaaggacaggagcaaggatggaaggagcaagagtgggcagcctgggtagcaagttcctcgatggaacccagggtgtcaactttaggcttggacaggggggtgactgactggctggaagagaatggacagaagatagaggtagatgatggctgagccccagccccaaggagcttgtgcaaggctcctgcaatgcatttgtattagtccattcttgcatttatataagaactacctgactctgagtaatttacaaagaaaagagatttaagtggctcatagttctgcaggctgtacaggaagcatggttggggaggcctcaggaaacttacaatcattgcagaaggtgaaggggaaggaggcacgtcttacatggcaggagcagaatgaagggggaagcgctgtacacttttaaacaaccaggtctcatgagaactcactcactatcatgagaatagcaagggggaaatccacccatggtccaatcacctcccaccaggcccctcctccaacactagggattacaattcaacgtaagatttgggcagggacacaaatccaaaccatatccacattctatagcctggatccattctcatggcctgctgactctggaaaaccaaactagagacaaacacagaggagaactttcatgacagccatgtaactactcaagcaactgacctgggcaggtcactctgcagctactcattcagagcccacagtcctcacgtctcaagtagggataataatacctggacattccaaccgtatatttaggaaggtgctacacacatcttatggttaacagagcttgggaagtgaagatacccagggtggacccaggaatcccaagctccagctccaacttggccattagacacccgtgtagtttagggcagtcttaaacctttaacctgggtatcctcacaggtgagatctgaggattggactagaacatctcaaaggtggttctaaattattaaacatagcaccctgggcagacccagagcccagctgcccatgcttgggtctgcaggtcttcagcaggccccggataccaggaactggagctgagcaggccccaaggttaggatccaggcttcctcaacgaaccactgtactatggggatcacaaggaagacttgcacagtaaaagcagcggccaccctcccgctcccaggaaaggagggaagactgacagccagtggttccagaaagcccaacctgaccacactgctcaaagggactcaaagtggtgatggaagccctgcaaggtcatagctattctgatctccaccttcagtcaggatccatgtaaaataccttcaccttagccactgggtgacgcatctcagtatctaagaagaatactgtcttaccccttgagaagaggaatttgtgtgcacctgagcatacctggcaggaggactgggcagggagcagggagataaagactacacctgtctgtctcataagagccctcatcagctggcatcctcctcagacctttcacatttctcaacaccaccctatgaacagacaatgcaggtctctccccaattctatggatgagaaaacggtggcccagagagattacgggacttgccatggccacacaggaagtggaagagctgggactagaactcaggccttgtgactcttgattcagtgccctctccaacttactgcttatccagtggtcccctctgggaagctgtaaactatcaagatgaggttgtgtccttagagccaacactgccaggcatccaggcatctctgccatggtacaggcatcagattcactggctttcccaccaccacctaggaaggcagagcctttggccctcatgccctgagattctcagcagcactgctgtcagtgggggacacgtggcatcacactttgggaagaggcacagccctggttctcccactggaccttcctgaggcttaaggagagaaagttgtatgcatgcaaaggagagggactttgcaaagggagtctgggagcccagcacttggcaagttcaaggacttcgggggcaggagatggcaggagtgaggagtggtgtgtctctatctctccctctctcccctccccctttctctctccctctctcaaagacaaaggcatctctctcctttgatgatgaaagatgattccaatattattacaaagaacatagtccagcaaggaaaggcagatcattctctctctctcactacccccaccccagagtgccaccctcggagagtcagaacaggagcctgtccccaagttctaccctctaacagcaggcactacctgagggacccccagaacggggagggggcctgtccttggaagagccacttctcagggccagagtcccaccctcacccaatctgctctttcaacccttggccccgcttttcctctgtgtggctctcgttgccaaccaggcacacccaggcagcaccccagtcatggtcctccccgcctcccatacacccaccaggcccaggtgagctgtccttcctgggatccttggccgatttcaaatgtccaattgtggccctctagagccaccaatgcagatgtgtttgtggcagcagcttccctggggcttagctgggcttcctgcatggattctcggggccacaaaatccaactttgtaagatgaggattcagtggactgtgagaaaggaatgtgatttccagcagacagacaggactaatatcagtaaatcctacacaggataaaggagggtgaatcggccaagggacatgagggatggagaaacatgtgccatgaagagaaagtaggcggaggtgtgcctccagattctgaaacttggacttcagaggcctgaattccacctgattcgcttgttggaatcaccctgatactcctgatactcccaggggttccctgatgacctactgtgtgcaggaaccaggcttgaggtgcagaatcagaggtctctgtcctcacttcctgccagctctgtagctcagtggctccacagaccttagatcaggatcaaagaccctttgagatgggataaaaggctctggcctcagacaacatctgtgcaaacatgaaatgacagaacggatgtgcagacgcggtagacagagtggatgcccaggtcagccgtgcctgttgtggaaacgaaatgcatgggtacagatgaaaaaatcacttggtcccagggtgcactggctggcaatgctctgcgagtctagattcagcatcgggtttgccaatgtccacagctcctcccaccccaccccacccatgcacacagcccctcccagacacacaccacacacgcacaacacatgctacacacaaaaaacacacaccacatgcatatatacacacatcacacacaccacagacatgcaccacacaaaaaacacaccacacacgtacatcacacactacagacataaaacacatctatgcaacatgcaacacacacaaaacaccacacatgtacacaacacacagacatatacacaacacatacactacacacacacacacacacaccacacacgccccccccccacagacacaccacatagacatataccacttacatacactacacatacacatacaacacacaccacacacatgcccccagacacataccacatacactcacgcacacaccacacacacctcacatgccacacacacaccacgcacacaccacacacacatcacatgccacacacacaccccccacacaccataaagacatataccacatatactcacaaccaatcacacatgccacgcacacaccacacacatacaacacacaccatatatactgcacatatacacaccacacacatatatgccacatacacccccacacatacacaccacacacacctcacacatcctacacaaaccacacacgtacacaaaacacaaacacatatacacaccacagacatccaccacacacaccatacaccccacatatacacaacacatacacaaaacacacacaccatacgcacatatacacaatacacacgcacaccacagacacgtacacaccagacaccccccataacccacgcttgctgactgtctgccctgtgcacactgattagtggagcagttaatctgctctgagcagccaaggacagggggccataacagcctagcccgtgagttaatgcccagagagatttagtccccacagcgctccaggctcctggggcttccgagacatctatggccctcgcatcctgagtgatggatgctaagacacaaagagactggtaggaagaaaatcttcctcaaggccctagcacagctagggccagggcctcctctggtagggacagagagcatgctcctgaagagcaaaaagatatttcgctcttccatcctgcaaacccaccatggggagcacctgcagcaaggcccacgaccatggccatgagaagaacagctgggtccgaggaagtgctgcactccagcggcagatggggataaaatcctgattccaactctttgccgcaggagggatgatgcaggcatgagtgctgcttgatgggaatgatcagagtctctgctgcccgcctgtgcagaggtaccccctctgcccctaacgaggcctctggataagccaaacacaaggagccattttctgagtccccctggtctcccatgtggaaacccctcaatacctcgggtcccctgatgaggcactgcccgaggctgctggcgtgggtgctcctgacaacccagggagaccgacagtcccacgccactgtcacagatgaaactggctctgagaggctgagcagccagccccagactacatggcctggaagaggccagcagggtggagcccgggtcagctcgatgggccactgaagtgtggtgtttgccgtttgtgggtgctgtattctgcatttggtgtgcattgggcactgtagtcacatacatacgctccaacccccttcaggcactctctcttccattttaactccttggatcccagggaagagggaggatgcctctcccaacccagatccttaaagcccatctccgggcagctttggctccacgcttattagctgtgtgacctggggtgagtcaggtagcctctctgagtcctcagccttctcatcgttaatatggagatcaccttctcttccctacctaccacacagcagatcatgtatgtgctctggggcatgtaaggcaccggtaggggaactatccactctcagttgtctccccaagaactgaagcacggcctagagaagcaagactctgtctacctcctccagacccaggccattgctccagggagtcctggggaggccctgatctatggcagagaaaaacctccagcaggctaagcctgcacccagaccccacctggttccaccgctgccgcctggctgggtgacttccctgtgggcacctcaggactaaagagcccagtcctcagcccacccttcaaaagaagagcaaaataggagagctacaagcatgaatttcctgcagggagtttgcccaggtgctcaagagtcaccagcttaaacaaacacctttcttggggcggccctaaaggggattgatttgaccccctacctgcgtgtgctttcttggggaggtatgtgaatcatactcctccaggtaaatcctggcctgcagctataatcaaccaatcagccacgcaacactcactgaacccccagtgtgtgtccagcattgtgctgggtgctgtgggagggtgagatccctgtctctggaacttcatcaccgtgacttggggaaatggtgaaatcaacatggaacaacacagtgactcggacactgcatgaagctgagctgccgcacacgtcagggatttaggaattaaaagagaggccaagatgggatgtcgccttctggaaaggcttcattgtgctcagcaaggctgtccaggaagccaagatgagatgtccccagaggggtagggaggtgacatctccttttgaatgaaagagacctcatgcggaaaagcttgagatagctcataattgcccagcatttcccaaaagcttttctttttcaatcaattttagcgctggatctgcttgaagaaaattagttttaagaaatattttaagacatttaaatcgaggatttttaaaactcccctattcccctgtggtttcctcacaaacttgtttataaattgggggtattcaaatgcttatgaagattggggtgagagaatgtgcacaataaattaaaagggaaagaacacctgctccaacctagcttcccggagtctgggtgttccgagccttcgctgcacgctggcatcatattacctgggaagacttcaaatgtacaaatactatgcccacccagagaggtctgggttggggcccaggcatccaaattctttcaaatgcctccaggtgatttctaatgtgcagccagggccgaggcccctggtgtagctgcatgttcacggtctgcctccttgtgagcactggaagccagcatttcagatttccctcctctcactgacaagctcctcgtcagtggcccgcttctgtctccccacagagccagccctcctccctggccatgctggaccttctgcacgtggctcgggacattgcctgtggctgtcagtatttggaggaaaaccacttcatccaccggtgagtcaaagtgactgtgctcttcctgtcatcctgtcgctgatctgtgtgcttccccgcagatctcaagggctcacatttcccccttcagagcagaatactaggtctccctccagagccatttggatgtaggatgattcagctttgttttattgtttttttgtgagagacagggtctcactttgttgcccaggctggtctcgaatttctgggctccagtaatcctcccaccttggcctcctgaaatgctaggatttcaggcatgagcgatggctcctggccccttcagctttgtctttgagatggtaacttattctatcagggattcacttgccccttacataaaacaagtgtcataaaatatcctcgccagggctggagacctataagttattcttaacctcctgtgaggacccctgcctgtatcttgaatgttcaagtcctatatcactttaaggcttccccctgccatagaaaactgggctccttatggggaagttaaggaattgcatttttgacaatgggtggcttataggcaaggatgctgttttagtcatctttgtatacttggcatagacacaatgtttgttggatacattaattttttctaaaatactctgaaatgaagcataaagatgattttcattgcttctatacttagtttcttctattacaatcattcttgtgtttaaaagctgtatagactgggacatcatgctgtgaacatcatatatcatgtatgtctttccttgtgaaagctgatgactttctcagctgacagcttgaaatcagaaaagtaaaacagatcatcaggctctttgcaaagctcttccttaatgatttgcctctaatgtagtaaataataacctggtgaactcacaataatttattaacacatgtcttctaagagtttaaggcatgttcataataattaaaatatgtaagtacaaaagagaaaatgagagatgttgtaagagcttagaaatagaaaagtatcatgcctgtaatcccagcactttgggaggctgaggcgggagaatcacatgaggttgggagttcgagaccagcctgaccaacatggagcaaccccatgtctactaaaaatacaaaattagccaggcatggtgggggacgcctataatcccagctactcgggaggtgaggcaggagaatcacttgaacccaggaggtggaggttgcagtgagctgagatcgtgccattgcactccagcctgggcaacaagagcaaaactgcatctcaaagaaaaaaaaagaaaaaacaaagaaatagaaaatcatgcaaatatataacaagttatgctttctccctaataaaaatggggaaatgagaggtcaggaagtacacttgcctaagttccaaagtcactcctaacatgaggcagtcaactctcagaagagcttatcctcttcctgtcacttcatccttttagccttcagttctccctccagcttctaaccctttccaacttgcaggtcatactgcttcatagaaataatggaagccaaaaaggagctgggcctagctttaccatctgctccttctaagagtctatcagttctgttcttttttttaaggtagtttttcagccctttccccgctccccagtcctgttcttgtcctttgcattgtacccagaactttccataaatctcagctctgggctttgccattccattgctcagtcaagaccaagctgtgctccttttgaagtcgtccttggttagagtcatctttccatctttgtccatgtgctttaagtctagactcctatgagagcaacccgcgtcacctggtggccagatgtcttccttcacttagcactgggatcttttctacttgtcttttgttttttatctctgcccacgttggtcaccatagcatacagattctctggctgagggatcatttccatttgtcctctgaccttttgacatctcctttcctacagccacaagacattttgatgatacccaatgctctgttgctatgatgttaacaggattacattccctcaagactcctgtcacttccatatctggaaatagttactgaaggttagaattagatcccagagtaatcatttattgctcttttctcctttttaagaaattaaattgtcaaacaccaaatcaagaaggtatcagatgatctgttttaagcaaaagaaaacttctggcagaaactgtccttctggggcaatttggtcatctgtatggaaaaaacgtcttttacatgttctaactagctaagaggtctgtggtacatacccacaacagagttgcctcgaattctctctctccctccaccctttatctgctcttaagattcatggacttccacacatgtatacttttacgcttttggaattcagagtggaacttcctcaccagatccacatgcttccatttttttaaaaaaattggatctttttcctttggacatggtttattgccatttcataaatgacgtgtcactctcccaactcttgatgtattctatgtactgcatttaccttcttgccattaaattcacgatcactttttaaaacaaccattccatacacatcagtgtaaagacttttctggagccataaatattgttcctggtctactttgctatatttctcttgagaattaacggctatacagccaactatttttctttctttttgatgtcatatgtgttatgcttttatggttttatgggggcattttatacaccacctcaaaattcaacttaaaccttctggatcaggtcagcagcattaacaacatgaatctcctacctgaacccgttattcttgtaccctcagtcatgatccccaatcaagatccttttttttaaatagtatcctagtagccagttgattctctaagtcctttctcaacctaggatcagaaccatcatgaaaccagttgaacatgaaaacagcagctgtgctccctaagtacatcttgttttttcctgcacaggaccttaatattattagagacccatcccagacttcttctggctgtatccttcattcctacatgcatgaccagaatggtaagcagagagtagaagctgatgagtcttggacagcggttgaccatgcctcagaggcaggctacaggaaagcaggtcatctatagtcaacagcagagatgacaactttatcacctggaagaagcgattcttcagccatgtagcttagcaagggctttagataaaatcatggacaaaagaaccataatggcttattttaaaaattaataataataactttgggaggccgaggcaggtggatcacctgaggtcaggagttcaagaccagcctggccaacttggtgaaaccctgtctctactaaaaatacaaaaaattagccaggtgtggtgctgcatgcctgtaaccccagctacttgggaggctgaaataggagaattgcttgaacccgggaggcagaggttgcagtgagccaagatcgcaccactgcactccagcctgggtaacagagcaagactctgtctcaaaacaaaacaaaaaactagaaatatttgtgaatatcttaatctacttgaatttgatttcagggaagtcatgctgttctaaaacactttttcaaacaactggcagaaaccagcccgtggtttgtaccaaatctgcctaaggccagatagcattccttatggccctatgttatctacttttagcttactttttaaaaaataaaatgaggacagtaatagcaccttgtgtcttataaggttgttgtgagagttagatatgaagcacttacaacaacacttagcacctagtaaaaggctaataaatcctagttcctagtatgatgcatttcattatggttgccccattaaacatttttaatcatttcccctaatccttttccatttctctcttagttgtgaggcctagaattgttaaggctgtttctctcacactgaagtatactatactaaaggaaatatagggaagggaaggaactatttaaacttcagcttggagataaaatcctagtgatggccgttgtacactcatcttcctagggataaaattaggaaatgcatttcctttcttcccagagacattgctgccagaaactgcctcttgacctgtccaggccctggaagagtggccaagattggagacttcgggatggcccgagacatctacaggtgagtaaagactgcctcacccctccgggcctgtctcttccacctcagcccctcaagaatggggtgtggctgcttgtcccttacatcatctcctggtaccctgtcaactttctacctaaaatttcactaagttccttttcaggctatgggaaaccttaattagtgaccatgcccgaaggcctaaatctgggatcacacttcctgcagtaattgacaccaagctttttttttttttttttttttgagacggagtttcgctcttgttgcccaggctggagtgccatggcacgaactcggctcaccacaacctctgcctcccgggttcaagcgattttcctgcctcagcttctcgagtagctgggattacaggcatgcaccaccatgcctggctaattttttgtatttttagtagagacgaggtttctccatgttggtcaggctggcctcaaactcccaacctcaggtgatctgcccgcctcagcttcccaaagtgctgggattacaggtgtgagcctccatgcccagccaacaccaagttcttaattaggttgtccatcggttccaactgtaatctggccatgctctgagacatgggataacttggatacttgatgtggaaagaccttcaaagtgagctttattgaacttcctcaactcctcagtactcaggaattctaagtggctatggcttctaacaccgcaggcatctgcatcccaggtcgggcaggatgcagggcctggctcattgctcagctttagccaccccaggagatgtggagtatagcgcagaacccatcagtacttagcgcagccttattttttttttccctgtcacattttcaagactacattttaaaaattattttttttttcagttttaaaagctaatactactttaattgtactttttctcactcttctcttcctagcctctagttcctttttttccctgattatttacaacactgacttgctatgtgagctcagcaagtccctccttgcacaggatgaccccttccctaactcacaggggtagagagaggagcaatcgttatatggagctttaactctttggggaataagtgagactgatccagacaccacccctgaaggcctccatcaaacatggtaacagtccccacaggggtgagcatgctgaggccatcatgttaccacggggcagcagcatgtggaagatgtagtaaagacgtctctggagtgtctaccactgctatccgtcgcactcctctcctctgctccacttcgccttctaacactacccacaagctcagcgttccttcctctccctcctcagaataccctgggactgcctctcatttcaaatacaaatgctgcagcatgactcctcgagccctctgttatctgacttttccttcccaggctcagctctgacagctcccagctccaggcttcaaccaccctaagttacctacagtccttcattccccacctactctgcactttgtacaatggcacgggtcaggaatggtcttctgggagagcgtcttttctcctcagctccatcagtgcccttctgtgaagctttccctacccctgcctcaagtagaatgaatcaattcttcatttgtgtcactgagccttgcacatacctgcattactgtgttttctatattgcaatgcatatatatccatttcttccactaaacaatatccttgggagagagagactgacctatttatgtcctcagcacatggcagagtacctgatacatactaaatattcagtacttatttattgaggtaattaattaatgtcgacagctggcaggaagctgcttcctgtaacacactcacacaggagaacaccaggctagacatgcaattggcctaacaggcagatgagttaatttattggtttttagcagtgagttgcattaatgacattactgatgaaaactaataaattaactcatctaccttgtaagccaactccacacctagccctgtgttcttttgtctgggtgtgtcatgggaggcagcatccacacagctgtctagattactggttgattgcctatactgaactaaatgctgtgtgagtgtcagaggatccaaaatgattaagacacaagccctgctctcagttctcccattttggatcttgcattactgcagatcatcagaaacacactatacttataaggttggagtaatgttattcattgtgagctataataaacaaaacccaacagagaaagctaaacatctgctagcaggtatcttagtcattgcatagatcattcctctcatgcctctcgtggtttgttttgtcttctattaaatgacaccaaagttcttaactaaatgatctgtgtgcccctgctctcctcctgaaccgccaaggactcatggttaatttcagacctttaatgggtagactatattgttgccactttctcaactttcccagcagggcagatgcttaatgccatctccagatcctagtttggttttcctctccttccccacagggcgagctactatagaaagggaggctgtgccatgctgccagttaagtggatgcccccagaggccttcatggaaggaatattcacttctaaaacagacacatggtaagtcagccatcatcctccaggtatccctgcagccataaggtggtgctcctgggccaaaggactctatactctaagccgggagcccgtgtgttagtagggagggaaaagagaagaatcaatacacccgacaacagtggttctcaaacgtgagcatctatcagaattcataaagacttgttaaaattcagattattggaccctaccctgggaatttatgattcagaaggtctgggatctagctgagaatttgcatttctaacaagtcccagagtgatgctgccattgctggctgggaccacacattaacagccacatgtaattttaaatggcagattgaacacatgcccctcacaaagtacacatacatacacacacacacacacacacacaccaataaagggagtcttttagttgcattaaaccctgcaagaacacaacaatgacaaaattttggaaactgggaagtcatgaacaagtggtaccttactgagaagattagaaaatggatctctaaaccaagtccagatccagaaacagggctggttccctctgcctgagagccccagaaaggtccagaaattgaaagtaggggtgtaggccaggcacggttgctcatgcctgtaatcccaatactttgggaggctgaagctggaggactgctcgagcccaggagttcaagaccagcctgggtagcatagcaaggccccatctctaccataaattttaaaattagccaggtgtggtggtgcacgcatgtggtcccagctactctggaagcttggatgggaggttcactagagcccaggaagtcaaggctgcagtgagctatgatcatgccactccactccagcctgggcaagcaagagagggggagagagagggagggagggaacgagagagagaaagaaagaaagggaggggagaggaggtagaagggaggggcagagaagagaggagagagaagaaagggagggagggaggaagaaaagaaggggaggtatagcaaacaggaaaattcatgaaaggtctgtttaaggaataagtaaatcctgtggctgagcccctcacccctgaagcttgctggctgtcccttatctaccatcagcacaagacttgggctctctctctgaagagactgaactgaagtctccctggtcctggcccccactggcccctcagcaccaagaatactggcaactgggcagatcatcagagaatttctctttggaggaccgatgaagagaaaattacagatacagtactgccaagtggggcacaggtgcagtgggctgagtaatggccgcccgagggtatcaggtcctaatcccaggggcccagaattgttgccttataaggaaaatgggtctttgcagatgtgatgaagttgaggatactagagtggggcagctgtcctggatcatctaggtgggccctaaatgccatcgcaagtatccttataagagagaaggaccaggagatttcacacacacaaaagaagagggagtgtgagcacagaggctgagactggagatgcggccccaagtcaaggaggtcccgcagccaccagaagccagaagaaggagggaacagattatcccctagagcctccagaagggacacagccctgctgatgccttgatttcagtcctgtgataccagtttcagatgtccggccttcagaactgtcagagaatgaacttatgttgttttaagccaccaagcatgtggttgtttggttggttggttggttttgttttttacaacagtcacagaaaattacagctagtgaaacaagcaagcaagctacccaccagccaatgtgttacacagaactttctactggcttcttaatatcccagtcttaaaatatgaacagacagccaagaatcaacaaacatttaagaaaatattctaatctgaagaaaacacacatataaaaaggaacttgaagaaacatgtagaaagtttaggaaaactttctaaaaaactataatatcctccaaaagatcagaaaaactattgcaaccataaatggaggacaaaaggttattttaaacaatactcttaggaggataaggaaatccaagtgtgataagaggtggcctcaaggagataggcatggctaccctgaagcctgtgtgggctgcgtgttctcactttcttccaaagagtacagggctgggtcagaggggaaaagagaaacttcacagtggagagacctgacaaataacgacctcagccaggtgctcaaggtcaacctcaatagtgataagtctaggggccaagcacagtagctcatgcctgtaatcccagctctttgggaggccaaggtgggcggatcacctgaggtcagaagttcgagactagccttgccaacatggtgaaacacatctctactaaaaacacaaaatttagctgggcatggtggtaggcccctgtaaacccagctactcaggaggctgaggcaggagaaatgcttgaacctgggaggtggaggttgtagtgagctgagattgtgcaactgcactccagcctgggtgacaagagcgaaactccatctcaaataataatagtaataacaacagggctgggtcatgttgccagtatgttcccctgatgtgatgaaaatggtactttacctctgtggtcttcttcctccccacatcccgtaaccacagtctaatcatgagaaaaacagacaaatcccaattgaggaatattctacaaaatccctgaccagattctcaaacctgtcaaggtcataaaaaacgaggaaagtcggaggtgttgtcatagtcaagagaagcccaaagaaacaagacaattaaatgtaatgcgatatcctagtaggactctggaatagaaaacagagattcagtgaaaactaaggaaatctgaatgaagtatgggctttagtcaataatgccttaactgtggttcattaattgtaacacgtgtatcgcactagtgtgatgctaacagtagcagggatcaagtgtgaggtataggagaactccgtgtattcatagtttcttccaagtttgaactgttctaagaaaaaaatcttattatttaaaaatttgatgacagaaatgcaatgaaaaggatggagtgtgaagctaaataaaccttccagaaaataaacctaaaaagagatggaaaatataggaaaatataataattttttatttaaaaaattaaggggtagaccaaaaggtccaatttagctgacaaaataggagtcccagagagaaggaacagaggaaatgaagagaataaagacagcagagcaatcattcaagatttcctagcacaggacataaatttccagaatgaaagaattcaccaagtgccaatcaccatggggaaaaagggcatatcctcggccgggcgcagtggctcacacctgaaatcccagcactttgggagaccgaggcaggtggatcatgaggtcaggagttcgagaccagcctggccaagatggtgaaacccgtctctactaaaaatacaaaaattagctgggcgtggtggcgggtgcctgtaatcccagctacttgggaggatgaggccagagaattgcttgaacctgggaggcggaggttgcagtgagttgagattactgtagcctgggcgacagagcaagactctgtctcacaaaaaaaaaaaaaaaaaaaaaaaaaaaggcacatcctcaggccaatggtgataaagatcctgcaaacttccacaaagaaaatttaaaaattaatagtaaaaaataatagagataaaagataaggaatccaaatggcatcaaattgcttaacagcaccacaggaaacataagaagacaatgcaagaatgaaaaacctccacattttgaaagcctggagctgagatcatgtcataagatggtgcggccacaaatagtcagagctgcctttctgaccagcattagataatgagagcaagagcctttgttgtttttacaccagtgagatttggttttaacctaacccagtggatctctaagtgtggtccatcagcaccacctgggaactgcgaatcctcggcccccacctcaggcctaatacaacagaaactctaggggtgggactctgcaatctgtgttttatcagatgattctgatatgcagggaagttagagcaccagcaacccaggggatccagagacagagaataacttaagcaattaagtaattgtcctgaacacacacacatcctgtgacctaacgctcctatttttaagtaaatacattagagagaagatgacacaaatagacttgggcgctggatgttcacttgcaacattgtttacaatagagaaaaagcaaaacaaaaacaaaaataaaaacaaaacccaacccaactacccctcaactaggagatggaaaaattaactgtggtttacttacatcatggaaaactattccgcagtataaaagaagacaacctacatatatcaacatagataaatctcaaaaacagtgttcagtggggaaaaagcaaattacaaaaaggagtaggatatcatttatgtataactttacaatataaaaaatgtctataacacagtatcgtttgcgctttcacgcattgtttaaaaatgtgaaacatacaattgtaggatacagtctaacttcaggagagcagagagagggaggtggggtctttctgtctctaagtcttcataaagaaagggagagctgacaagaataagacaaaagattaacatctagatacatagataactctgttcctttttaaagttttgactgtttcacaattggaatgcttaaacaaattatatagctgcaaggattaggaagtgctctaagacaatcaggcagaaagaggaggagctggggtttttttggcaaaggtgggcggggggaagctccttaccggaggtaacttcaatacctgaaagaaagggcaggccttggaaagatctgagagaaaggctttccagactgcaggaaaagccagtgtgaacagccagaggcaggaaggagcctagcttgcttgctgaggaatgaaatcaagtcctgatggtcggagctaagggagcccagggccaataggggtggaagggatgggtcagaacacagacggccttggaactcagatgggggatgtggattttattctaaacaccatgggatgccggttgaagggttgtaagcaggagtgtgatatgatctttgctttataaaaaaaatctctctgccactgaatttacactagaggtgggtaagtgaagaaagaaaccagttaagaaaatcctgcacattgctagctgagagaaacaggagagcgatgtggcttggtggtggcagtggaggtagcgcaaagtagtcagattcaagatttttttttttttttttagactgtcattctgtcgccccggctggagtacagtggcgccatctcagctcactgcaacctccgcctcctaggttgaaacaatcctctcacttcagcctcccaagtagctgggattacagacgcgtgctaccacacccagctaatttttgtatttttagtagagacgggatttcaccacgttggccaggctggtctcgaactcctgacctcaagtgatccgcccacctcagaccccaaaatgctgagattacaggcatgagccacagcgcccggcctcaagatctatcttgaatgtagagttaacaggactgctgactgttggatgggaagtggaggggtgtgggataacggagtcaaggatgactcctgggttttgggcttgaacaaatgcataaccagaggtgctgctgagttgggaaagaatgaaagaggagatggtgtgggttcagaaggagttccgtttgggcatgttaaatttgagttgcctattaaaataggccagtgaagctaatgagtgggcatctgatagatgaaactaaagatcagagaactgtatgagatcttggtgtatgagatcttggaatccactggatggacatttaaagatattaatttttggctcccatttttcctaagagcataacctctatcacacctggagaccatcttccacaatgtttttttttttctttaatcataacctcctttcaggttatgattaaggagaaaaatgtagcttttaaaggctgatacagaacagcttgatattttaaaatcttttatcagattatcttcatcgattcaaatgtttaacagtttaatcagcaataatgtttgctattatttctatcaatcattccaggcagagcaagtttaataccaaaagaaagtgaagtttaaaaatatatatatacacatatatatacgtatctatatacacacacatatatatacgtatatatgtatatacacacatatatatgtatacatgtatatacatatatatacgtatatatatacatatatacgtatatatatacgtatatatatacatatatacgtatgtatatttgattttaaatgctctggtgcaaagctttgggcttttgtcgctcctgtttagggcaggcttataggtgatgaaagaaccatctggcatacaaaatatagatttgcctcatctgtagggtttctagataaaatacaaaatggtcagtgaaattgaatttcagatgcacagcaaatagttttttagtataaatattggagcatacatatactaaaaaaactatgtgttgcttatctggaactcaaatttaactaggtatctggtattgtttgcaaatatgaaaatcctacttattcaaaattgtcaaagttctatgaccaatactacttcttgctcccttgaactctaaactaagaaaataaatattcatgtgcagttctattagtgctctcaaaggatgctataacctatatctatctagaaaaacagaaaacatatagctataattctttaggccttactgccagtttcttgttcatttgattttgcctagttagttttgccttgaagggaagtaagatcaccaaacagaaaggaataatatatgtgccaggcaatttgtaagtagcaaaatcaagagatctccaaacagaaaggaataatatatgtgccaggcaatttgtaagtagcaaaatcaagagatctaataatgtattccagtctgtctcggattagttgtataataacctgtgcttcaaccttctcacctgaaaaatagggaaaatatctttgcccaatccttctcacaagagtctttgaaatttcacacagatgatgacaataaaagcaccccatgtttcttagaagatgaaggaactattgttctctacaatttttgtggtaatatttgctaacctcagaaaactacaatcacactaaaagatagtctttgtcaaaaagctgatcattaggtagtggtttaaagttttaatcaaaatatcaaaggtgattcttttagaacacgaagaattcatctcataaagcttttaaaaaaacaaatgagaaatcaaatattttttaaagagaaatagagaaaaatgccttttcagatttaagacaaatacacagaaagtaaaatagaatggtatcaatgcaagaagcagacaaatagatgaagtgaaaatatagccagaaacagacctgtttttaatcgtgagtcaatgggtaaggaggaaattatcttatgcatagtgttggaagagtagttatttgaaaagcaaatcaatttaggtccttacctcacactagacaccaaattaaattccaactagatttaagaagagagcaaaaacaaacacaactagaagaagatagcaaatatttatctaatctttggtgaagggaagattgtataactataaaataaaggaaatcatgacattaaaaaaataggtttgactatctaaaaataaaaatctttctttggtatgctaaaaagtagcattagaaagcaactaaggccaggtgcggtgtttcacatctgtaatcccagcactttgggaggccgaggtgggtggatcacctgagatcaggagttcaagaccagcctggccaacatgacgaaaccctgtctctactaaaaatacaaaaattagccaggtgttgtggtgggcgcctgtaatcccagctacttgggaggctgaggcaggcgaatcacttgaacctggaaggtggaggttgcagtgagccaagatggcaccactgcactccagcctgagtaacagagtgagactacataaaaaaaaaaaaagaaaacaactaataaaagtatttgaattttttataaaaggttaacatctctgacatataaagagtgcctacaaatcaaaaagaaaattgattgatagataccaatttgtcccagcagataaaaatgggcaattcataggaaaaaaaagtgaaatgaattaataaacacttgggaaaacatccaaccatgtgaattatcaagtcaataaacataatttaaaatattctaccattttttcccttaaaatcagcaaaagttgtcattattattaagaatactcaatgctggtgagtgtgtctaccacgcttttacatggtgctggtagatgaacagagtaacacatttggaaaccaaataatatgcaccaagaatttgtcaatattcatagtcttttgatctagttattttactagaattagcctacattttaattcagtaattaccctgaattactagattatcctatctggattcaagatctatcttgaaagttataggactgctgactgttggatgggaagtggaggggtgtgggagaatggaatcaaggatgactcctaggttttgggcttgagcaaatgtataaccagaggtgctgatgagttggaaaagaataaaggagatgatgtgtgtacagaaagagttccatttgggcatgttaaatttgagttgcctattaaaataggccagtgaagttgatgagtgggcatctgatagatgaaactgaagctcagagaactgtaagagactatgaaatcagctggctggacatcctaatctagtaattcagagactttatcttaaggaaatcttccttttaaaaaatgcacaaagatgttcattatagtattttaaatattttgaaaactgaaaacaatgtggaaatgataaggcaaaccaactactcaatggaatgttttacagccattagccattccaaatgttatttatgaaatggactggcatggaaaatgtttatgatataatgaaatgtgcagaaaagtcaaggttcaaaattgcatattgaatataactgcaaataagtgaaaaaaaatctcagcacagaaacgacttaaaaatcaacaggggttgtcttttaagggagcatcatgtgtagtattttcttattttttaaatttttctacattttaagagttctatgttatggaaaagggtataatgggggaaaaaaaggttgaaattgtatgtctgtgtgcctgtgtgtgtgtgtgaatgtgggtgggtgtgtctatatccatctccatgtcctctgtcccatgcccaggtcctttggagtgctgctatgggaaatcttttctcttggatatatgccataccccagcaaaagcaaccaggaagttctggagtttgtcaccagtggaggccggatggacccacccaagaactgccctgggcctgtgtatgactcttttaggaacacttctgctagttactaagcagtttttcttttcaaaaaatatccagagccacatatgcttctttaagatgaaggggcagatggctgccctccctttaatatgccccaagatgcgaatgtgactgcgacttcagtgagatggatgcgtctcccaggccctcaaaagcaaggatgccatcccagaaaaagtatccattgtctggctacaggctgtggactcaccaggcctacattccccaagctcctgctgggaatgtgtgtcccaggcccagtccctgctgccctacaccgtatgtctgtgtctactttaaagatttccattccctgcaatgtctcctgccctgcctggcacccctcacttccttcccacaagcaacgtggatgggaaatataattggaatattctgtccccaaagtggctttaactcaggaatggagtgacagcagccgtggttaacataaacatcaggatgtctgtgttagatacctttacacctgcgcactcttccttgaccaatcagcagggggcagcataggccaagtacacggggcctagacgagttcgcaccctcaacgtattcgttgcaaccctggggctggaagaaaatatatttttcatcattgtgcttctccttattttaattaatgtgcttcttcttttagataccggataatgactcagtgctggcaacatcagcctgaagacaggcccaactttgccatcattttggagaggattgaatactgcacccaggtaaaacattttctccctttggtcaacatttactctatatgaaacagtcttaaagatggcaaataccgaaatatgaaataggtcaagccagtcagagtacaagatttatgatcaaaatagtgaaaattaattttctctaaaatgaaatgactggtgtctccatttgcccattttgtaaaataaatattagtaacttcaccagcacacagcacagtgccagacacacagtaaaaactggggaatcaatccagtccacgagaatttatcaagtccctactggggacctaatgttttagtagccaaaattgaagcttcacagacgtatggaacacatctgctctcaaatagtttagagcctggctggagaaataacaacatgtgaagtaattaattgcatataaaattgatagattatatgtccaactatatatgtcaggaggattaagggaatgaaatttcaaagtaatctggagaaattttaacatcatcaataatacttgctatcattcatactgcacaaatcactttttgcgtatttcgttttatccttagtggggaatgtaaaatatccctaccttatagatgaggagttaaggcctgaagagtctgtccaagtcaaacattcttctagcaatcctgtgggttcctctacagatccctctcccattccttcaataacgactcgaaatttttgcttctctccctcattttcagccgacagctatgcttcctccctcaccaagagggtggagatcatcataagagaatgccctcatttcctccctgtctctgatacaaacttctctgcctctgccgccatttctcaccacctgccttcccgtctctcctccccttcaaggccagccttgctgccagtatcaccaatcgcctgctcagggctttgttctgtccgatgctctcctcttccctgtattcactttctttccctctctcttggttctcgttctgccaggatatctaattctgagaatattttagaagagtcaataaaccactatttatttaatttaattttgggagcagtctcgctctactgcccgggctggagcacagtggcgccatcttggctcactgcagcctccacctcccgggttcaagcgattctcctccctcagcctcctgagtgaccaggattacaggcatgtgccaccatatccagctaattttttttgtaattttagtagagatggtgtttcaccattttggcaggctgatctcgaactcctgacctcaagtgatccacccgcctcggcctcccaaagtgctgccacacctggcctacctactatttctttaaatcccctcctcttcattgtgactaaagacagacacatttttcaaactgtagtcattttccagcctcactactccatcctcttattcctttcagctcacgtgagtgaactggcatttttatctatagacttcctatatcacgttattgaaggttctttcagagaactctgtttaatgacattaggttattttgttgtaatctgaatggaatacacccacttaaacatatataccttcttaggagtatttttctcaatagtctataatatccctcttaaaaggcagttttacacaagcatatttaaaatgattgattcactatagaaattactaaaacacagagggaactaaagaatgttttaatgagtcagaggtagttattttttaaactcgaacactcgtgtttttctgttactcaggtaatgagggtattttctcaatttgcataaaatattaattaatttctccaaatttaatttttcttccacaaattttccctaaacttctggcagctgcttctgttcttctatgttacagtctattactgtgaaaatgatctagcacacagttgtttttgtaaatggttttcctcacagcacttcagcatttcctgggttgtgcaaagggtccctcacatccagactagttaaagaatgcctgtaatcccagcactctgggaggccgaggcaggtgcctcacctgaggtcaggagttcgacaccagcctggccaacatgttgaatgaaaccttgtctctactaaaaacacaaaaattagcgggggtgggggggtgggggggtggggtgcatgcctgtaatcccagctactcaggaggctgaggcacgagaatggcttgaacccactaggcagaggttgcagtgagccaagattgagccatggcaccccagcctgggcgactgagcaagactgtctctaaaaaacaaacacaaaaacatgcactgtggtacctgcacatgtgatgatgtggcacaggaaaacttacaatcaagtgtaaagtacccaaatggaaatggaaagcagctgggaagagatcaaaaaataaaccctgtaggccaacatggcatgtgtctcctctcctcctccccccagccccccaccatcactcttgaagtcaaacacataggcttttatttttattttttccagttggaacgattttagtggaactagactggaataatacaaataataatcttaattttttttttaaatccactaatctttaaaaactggccaaaggtctcctcctctgcaaagcttttcctgctccactctgtcccaggcacccatacacacttccattatagcgcttatcctctaaggtctttgaggataaggatgacttcccattcattttgtatgccccagtgcctgtaagttactatattctcaataaatcctggtttcctcatctgtagaatatgtttagataacatcatctctaaggtatcttctagatccaacattttttgtctctgattcaaagttttaataatttcccctacggcaggacccggatgtaatcaacaccgctttgccgatagaatatggtccacttgtggaagaggaagagaaagtgcctgtgaggcccaaggaccctgagggggttcctcctctcctggtctctcaacaggcaaaacgggaggaggagcgcagcccagctgccccaccacctctgcctaccacctcctctggcaaggctgcaaagaaacccacagctgcagagatctctgttcgagtccctagagggccggccgtggaagggggacacgtgaatatggcattctctcagtccaaccctccttcggagttgcacaaggtccacggatccagaaacaagcccaccagcttgtggaacccaacgtacggctcctggtttacagagaaacccaccaaaaagaataatcctatagcaaagaaggagccacacgacaggggtaacctggggctggagggaagctgtactgtcccacctaacgttgcaactgggagacttccgggggcctcactgctcctagagccctcttcgctgactgccaatatgaaggaggtacctctgttcaggctacgtcacttcccttgtgggaatgtcaattacggctaccagcaacagggcttgcccttagaagccgctactgcccctggagctggtcattacgaggataccattctgaaaagcaagaatagcatgaaccagcctgggccctgagctcggtcgcacactcacttctcttccttgggatccctaagaccgtggaggagagagaggcaatggctccttcacaaaccagagaccaaatgtcacgttttgttttgtgccaacctattttgaagtaccaccaaaaaagctgtattttgaaaatgctttagaaaggttttgagcatgggttcatcctattctttcgaaagaagaaaatatcataaaaatgagtgataaatacaaggcccagatgtggttgcataaggtttttatgcatgtttgttgtatacttccttatgcttctttcaaattgtgtgtgctctgcttcaatgtagtcagaattagctgcttctatgtttcatagttggggtcatagatgtttccttgccttgttgatgtggacatgagccatttgaggggagagggaacggaaataaaggagttatttgtaatgactaa

SEQ ID NO: 12 - DNA, 15561 bp, Homo sapiens
gtcgcgggcagctggcgccgcgcggtcctgctctgccggtcgcacggacgcaccggcgggccgccggccggagggacggggcgggagctgggcccgcggacagcgagccggagcgggagccgcgcgtagcgagccgggctccggcgctcgccaggtccgtgcttggggccgggcaggctcgcggaggggtccaacggtgctcgcggaggggtcggggcgcggctgtcgcggaaccacagaggtccctgcagcgggccgggccggggcgcgggcttcccgctccggaaagtttgccgccgccgccgccctgggagggctttgcagcagccagggagggaagggggaggagggagggaccgcggcggggaggaggcggccggcgccaggcggcccgggagccctgggcggcggcggcggcgggcggggcggctgggggtcggaggggtcgggacgcaggagccggccaccgccgctttcgtccctgtccgcccctctaacgagctgccttcctcctcctgtagtctcccgagcggcgcccgcctcccgccggtgcccgcgccgggccgtggggggcagcatgcccgcgcgcgctgcctgaggacgccgcggcccccgcccccgccatgggcgcccctgcctgcgccctcgcgctctgcgtggccgtggccatcgtggccggcgcctcctcggagtccttggggacggagcagcgcgtcgtggggcgagcggcaggtaagaagggacccactaggcacgggagaggccggcccgtgcgggcagaggcgttggggacgggaaccggccccgggtcggaggggccgccgggtgtgagtgacgccccggggttagagcccggattccgctgcctccttgccggagagcgcggccagagctagcgcggcgacttgtggtgcgcccggagccgcagctaccctccaagtgcgaggccaccacggggagccaggctgggggttggcgtccgcagccccgatcccctgcgactccctagccctggcctgtcgggagggcgcggggggccccatttccacgattcccgctgttgttattcgggttctgcgcagacggaaagttcccattgttggcgtccccctcccccgggccccagtttgtggccagcttcggccaaggcgagagaccggacttctaagggtgggtgtgcgcgtcagcgaagcccggcccctgcccgcccgaagaggcagcagcctccagcgtccccgctgccgaccctgcccctgcctgggggccgagggcgcttccccgtgggtgcgcgccgagctccaggcaagcgaggggcgcgtgtcccagcgtcgcgggccctagactgggctggcggtccaggtcccgcgggacgtcgagggtctgaagggaggtcccaaggggcgaggggaggggaaggggcgcccggccggacctgcacacgcgccgcggttcctcgtgggccgggccgagagctccggtgccgccgccgcgtacacccgcagccggctccggacgggcgaggggggcgcgcacagctcagcccggcggccgcgcggagggaggccttggcccggtgagctcgcgccccacccgggccgaggcccgaacagccgcttctttgtacctcgacgcggccacagaccgcgcattgatggcggctcggcggctcgcggggaggtgtgagcgaccgcgggcgcggcgggccggggagggcgcctggagggccgaggcagatggcgtccgccccgcccgcgcccccgcgcccctttctccgtcggcggctgcagcctcccggaacaatgtcattttttttatgaatgaaagtggcccggcgcttgaatgtgcgtgtcattcagcggcgtgacaggggccgtcgggaggtcagcgcgcgcttttagcgtctgctcgggcggccccgcttccaggggtgccggaggggcggccgcggggggagcttggctttcgcattctcattcagataaagatattactccctacggcccgggaatgtcagccagccccggggaagggcggcggccaggctgcggagcctctcctggaccccctgcgggcgcgcggggcctcccccagtcgctcctggaacgccccgcccacccctcccccggggcggcgcccccgcccgcactggagctggtgaaacaggtagtgagttgatcggtcaataaacttaatccggttccttaacaagatgggccgggcagtaaaaatacaaagacctcgtgaaatggactgaggtctaggctggcgcttgcccgggaacataaattatggagccttggctcgcaggggtcaagggcggtgggaaaggttttggccactggactgccctggccaccccaggccctgccaggacagcccccatctccccagggggccgtattcctggttgggacctggagtgaccccccagggtgcagggaggtacacaaggtcggctctcccacagtcccaccccacccagcaggggtctgggggtgcagggcctttcccgaaggtgctggctgcaacctcccccactcctcctctgcagggctggactttgagccgcgtgggcctctgggtggttcattaacctgggctgagcctggcctccaggtccttgtgtgagcctaggaaccccttgttacccaccccccagctccccagccctcaggtctcacttggggctagatctggggctgtggcaccccttgttacagctgagcttgagtgggagcccaggggcttggggtctcctggaggacggggatctaaagtcacctcatctagggaggcatgcagccctcacctgagtgattcaggagtgaatgagccaggagtggagccacctttggtggggtaggggtcagcctggacctctaggctgccagctcaggctcgggtgccctcttcgaacctcagtttccttacctgtccaagagaaccgataatggcaggctgtttgaaggattaggccagataaccctggcaagccctctttagcctgcccagcctccagatcccttttttccggactttattgtgaaactccaggtggggagacagggaggctggacttttgggggccccctcctcttaggctattttatagctcctacctggcaatacctcctgtaccccagagagctgcagagaacttcatgtgcatccgaaaccagaatgtgttgtttcctgaccccaggccctcatctcaccccaaaacccaaataaacccctggggcagccagctccggaagcgagtctggatttgatccttgttctctggggtcaacccgaggggcttatgatggagcaaggctcccccatcctctcagccatgctccctcacatgcactgggcctccactgcagagacccagagcctggagaaaggttccccaggccagagtttggccgtccccagcaccctgcctaatggacatcagtcttggggccagagacccagggcagggagcgcctctcacccctaccctcactcctgcagccatttcagggcctggtgccctccctgagctcctgggcctgtggggtgggatttttactttgtgccacagtgggggaaactgaggtacaggaccagtgagtggcagagttgtggagactctgggacacagcagagggctgtcgttggcatgtggagcccaagttgaggtcggcactgtgtggggttggggcgccggcaggagcacgtgttgtgggatccatagaagggtgggaggtgggacgcgttgcctcctaccccgccttgggtacagcaggagttttgtctccaacgtgtttgggcaccagtgtctgtgtggtgtcagtggggcctcccttttgtggatcaagaaagaaagaacccttcctagggctgctggggggctatagctctccccatgcctggcagctgggtggggtatgggggctccacccaactgctgacttcccagtgggagtcagaccctgaacttatagcacccactcatgccccgtgtcacactgtccttcacctggtgctcgccacccagcccctgctggggtaccctggcctctgctggcacctagcaggcaggcagtggggggggcagtcagggctgcaccctccccaccacacacgggcagatggccactggtgtggctggcctggggctgctgtgtcccccgtccccccgtgctggaccaggctgaagcaaatacttgtgtggatggcttgacctgttgtcgccactcagaccaaaccggaaccaaccggctgttgcccttgggccagggcctgcagctgaggctgccataaccagcctgttctcggccttctggggggcctcgagcagctcccagctctgggtggtccccacaagacactggccaggaccggagggctggaggtcaggccaggagcccccctgactgcggggtccctacaggggcagtccttgagctgtgggtcccggtggggcgagggctccttcggatgcttcaggggatgagtgtgggcccttctggctggcagggtcaccctgggcactaggcgtgtgtggctggatcaggtgggttgggcagaagagggcctggccgggcagccagggactggtgtggccagagtgggcagctgggcccccgaatctaggccacgcgtctgcagaatgacaagtgatggcgcaacccgcccagctgggtctgaagaaggaggctgcctgggggaccacccacccccgtcccggccccaagcccgggacgcctgcctgcatgcattgtctggccctggcagggaagcctaggggcgattgtccccccagccctgcccatggtgtgtccttgggtcacaggctttggtggctctggggagctgggcagctactggggagggacccaggggccacctgcacatctgcccctgtgggtgggcccccaccccagcttctcagcccccagggaggggccagggctgctgacctgccctggctctcacagcttcctgcccccagcctggtcgtcctctgtgagggggccccagtccccctgcaggcagcaggactccaccccccggcccccttgagggcccgcctgggcctccccactccccggcctgtgagacccacttggccggacccagcgccgtgtttgtactttgctcttctcggtatgttttccgtcatgaccgccgtgtggagcttccataggagctgcaggatacagaaccttgcccaccccaaggagcccccacccccgccccggccccctcgcgctgctccggcctgtgctctgaccggtgaacccgcgcatcgccccccagaccgtccacacggccacgtgaccctgcacctccttccttctcgcctgttctgttccctggctgtccatctgaactgcttttcaggctcatatggggtgcgggggctactgaggacggacccctcctggggtgaatctgcaccacgagggggctggctggccaaccctggcaccccctctgagctccatttcagtcagaggccagcaaagggcagcctgtcccctttgcccgcagcacctgcccgtcgtggtgccgcctgtgagacaagcatggattttatgtttccaagcaattgaacaaattaaaagaacgaagagtcacattttgtgacactttgagatttgaattctccgtgtccatgagtgaagcatcatggggccactgctgtggggttggctgcaggttgtgtggggaaggcggctgtcacaccgaggcagaccggagtccttgggacagactggttggcaaagctgaagatagagacctttggcccttttgggacacagtttccagcccctggtctggtgggaccctggatctgggtcagagccttcctcactcagggccgccgaggcttccactgctgtgtctgtaaacggtgccgggtttgggggtgcctgcctcatggttgcccatcttccccacagaagtcccgggcccagagcccggccagcaggagcagttggtcttcggcagcggggatgctgtggagctgagctgtcccccgcccgggggtggtcccatggggcccactgtctgggtcaaggatggcacagggctggtgccctcggagcgtgtcctggtggggccccagcggctgcaggtgctgaatgcctcccacgaggactccggggcctacagctgccggcagcggctcacgcagcgcgtactgtgccacttcagtgtgcgggtgacaggtgagctctggggccacgccagctacagaaaggagccgagtgccgggctccctgagtccctgcgtgggtcaggagcggctgggggtctctctggtcattggtggagaggagggcacccccaggaagtgctgcccaaatgggggaccctgccccatctgggaggggcacctgggggcctcctggggcaggttgggcattggttgcggccatctctgccttgcagacgctccatcctcgggagatgacgaagacggggaggacgaggctgaggacacaggtgtggacacaggtaggagcagggtccagggttcaggccagccggggtggggcccgctgccaccgccaagccctgcccttcacaggcagctgagggactaaggccccggaacaacctccctggggtcaccccgaaggtctggtcccctcaggatacaggaggggctgggtcactgacatggctctagatgccccaccctggtggcagggctggggtgcaaggggacaccgtgttgctgatggggagactgaggcacagggccctgggggttccaggagcaggaggaggccagggctggcctgtggggctctggtgttggctataggtgaggtggaccccgcagacattagcgcagcagggcagggcactcaggtggctgccgtggggtggatggacccggggtgagggcgccggggcacctgccacaaccagtggcgggcagggtggctggcaggagggtggctggtgggtgggctgcggctgtgagagagcagtcggggacgatgcctggcgtcccggcctggaacggtggcaggtggactttgccaagttgtagggtggggaggtggggcttctggttttggagggagctctgaggggagtgcgtgcaggtgagggtcatcgtggcacagacatggggggcagttacgacttgcggactgatggtgtgtgcgctgggtccctgggccagtggggtaagcaggtgaggaagggaggctgagtccatgagagaaacagctgggggaactcaccctgggggtctccaggaggcctgggagggagctcagcaccgtggggtgcctctttccagcctgtgtccacactgctgcttgctgggcctcagtgcccctgatgggcgtgtgcctggagggggctggcagtgagctcactgaggggagggctgcttccctcctggggaatgccagcccatccttgcctggagtcccggcaggaaggcagcaccagccctgaggaaggagaaaaaccagttgggctgtgagaggggtggtgggagccctggacatcgagatgggaggaggcagggcctccagggtgccaccgtctctgggtgcccgccagacttggagctctgcagagggtggtgtagggtcttgatttccgtgggcccatgctgcccagctgcctccaaggctcctggctctgcaggcgactgggctcctctcctggtaaactgctcccaggtcctggcttgtccactagatgggcctgccccctgggtcttcagtctccccgttggtgggcctggccctggcacgcctctctgggcaggtgggctcccctggacaatgccctgtgccctgtgacttcacaggtccgggcagagcaccctggaggggaggggaggggacacacggcccagctctgagaaagccccggggaggggacaagatgtggaggctcctgggaacctcatcccgccctcttcctacacaggacgggaaactgaggctggggatgggcaggggcagctctgggaagggggttgttcagaggggcctctgctcccactcgggtcatggccttcacacgcacctcggcccgcaggggccccttactggacacggcccgagcggatggacaagaagctgctggccgtgccggccgccaacaccgtccgcttccgctgcccagccgctggcaaccccactccctccatctcctggctgaagaacggcagggagttccgcggcgagcaccgcattggaggcatcaaggtgggcgcggcggggtggctctgggcctggcaggcgcggtggttgctgcctccgctcactcacccgcccgcgtcccggtgcagctgcggcatcagcagtggagcctggtcatggaaagcgtggtgccctcggaccgcggcaactacacctgcgtcgtggagaacaagtttggcagcatccggcagacgtacacgctggacgtgctgggtgagggccctggggcggcgcgggggtgggggcggcagtggcggtggtggtgagggagggggtggcccctgagcgtcatctgcccccacagagcgctccccgcaccggcccatcctgcaggcggggctgccggccaaccagacggcggtgctgggcagcgacgtggagttccactgcaaggtgtacagtgacgcacagccccacatccagtggctcaagcacgtggaggtgaatggcagcaaggtgggcccggacggcacaccctacgttaccgtgctcaaggtgggccaccgtgtgcacgtgggtgccgccgctggggctcctgggctggccccaagggtgccccttggctgcgggttgcgtgaggatttgggtctaggggttggagcttcgggggcagaagctgtgggggtgcttgtggggccaagtctcagccaccccacacctcagggccataggcagctgcgttgggacccgtttccgtgtctgcagagggccagcctcagccactgaagtccctgacatggagctgcccacgggcttcttgggggtgggtgcggcttgggcagcagtggtgccccaggacaggagggcagtgtggccaagccctccaggccccctctgggcctcagaggcggtggctgagccccgacctggccgattggctctcgtcagctgtgtgcagtggggcccgagctcactgtctgcccgcctcctgaagcccttagctttgttcccatggctgccgggtgggggccactgaattgggacggttgcgacactcaaagcccaaagagaaacatctgttcagagagaagacggtctcttgggggcggggagcaggcgcagggcgagggtggagtccagaccccgcccagagaggccgcctcgggccctgtccagggtgcaggttctgcaagagcccgggggagggcaggccagtgaccagaggttgtctgagggtctgggctgggttgttggggtggaggcagagacgtgcatcctgtgaaaccacagccaccgtgaagtgcctccacgcctcctccaggcagcctttggggctgacgcagcccagcctcgatctgtaccttgggggtctcccacatcctgcctcgtgcccggcggggctgcctcgggggcgtgcctgagccgggtctcttgtccccgcagtcctggatcagtgagagtgtggaggccgacgtgcgcctccgcctggccaatgtgtcggagcgggacgggggcgagtacctctgtcgagccaccaatttcataggcgtggccgagaaggccttttggctgagcgttcacgggccccgagcaggtaacgactctgtcccatgccggccggcacaagagctccagctccaaggccctggccgcgcgccctgcacgccccgcacgcccagccctgctcgctcccgccccggctcgcgctccactcggggccgcctcggcaaggctggcagctccagcctccacggtgaccgcccgcttcgagccctgtggcctgcgccgacccttcccgcacgcctgcgacccccacaggaggtgcccggtgcccaccgggccggctccgtgccgtctgtgagcacccctttgcgcctctctccacccctgcccgctgcctgctcgcttccgcagcctgtgtgtccctgtgtccatcctccacctgcacccgcccggctctgcgctaacccgcatgctgcctgcccgcctgccgctcacctgggacagaggactcgccggtggaggggcctggcttcgggctcagtaccggtgtaccaggcggagggccctcagccgcgtggcggtgaccaagttggcggtggctgaggagttggtggtggcggcgttttccttgcagcggctggatcctgccgtgtggactctgtgcggtgcccgcagggcggtgctggcgctcgcctatcgctctgctctctctttgtagacggcgggcgctaacaccaccgacaaggagctagaggttctctccttgcacaacgtcacctttgaggacgccggggagtacacctgcctggcgggcaattctattgggttttctcatcactctgcgtggctggtggtgctgccaggtaccggcttctgctgctgctgctgctccgcactgtctgggggacgctggctcgggacacgccaaagctgccaggacggacgggaatcctgtgacttacggccgtcccgcttcttgagccctcactcctggccctgtgcccagtgtggggacaaagttggcctggcccggtcctggtcccagaggggccccctcagccccctcgagcccacttcccatctgggtccccaaaggcctctcctgtggctctggtgtctcccgggcgcctggtggcggtgtgggactggctggctctgctgggctccttctctccagggtctggccctctagactcactggcgttactgactgcgagaccctccagacaaggcgcgtgctgaggttctgagcccccttccgctcccagtggtgcctgcggctctgggccaggggcatccatgggagccccgtgggggggggggccaggccaggcctcaacgcccatgtctttgcagccgaggaggagctggtggaggctgacgaggcgggcagtgtgtatgcaggcatcctcagctacggggtgggcttcttcctgttcatcctggtggtggcggctgtgacgctctgccgcctgcgcagcccccccaagaaaggcctgggctcccccaccgtgcacaagatctcccgcttcccgctcaagcgacaggtaacagaaagtagataccaggttctgagctgcctgcccgccaggcctcctggagccccacctcggcccacgctggtcctgggctgtgtgagccctctctgcagccaggcgggctcccctctcctcgtctctgctcaccatgtagagcctagggtactttggggcacgaaacattctaaaaatcttcattcaatgctggtggaagtcagaacgcccccccttctggcccagcactgacccccggctgtacctccacgccctgtcgcccacgcggcgccaacctgcccctgctgacccaagcaggtgtccctggagtccaacgcgtccatgagctccaacacaccactggtgcgcatcgcaaggctgtcctcaggggagggccccacgctggccaatgtctccgagctcgagctgcctgccgaccccaaatgggagctgtctcgggcccggtcagtggtgctgagggccagcgttggctgtagggggcttggtggtgggggtgaaacagccaccagtcagaggcccggctgggtttaggggccgtcagggatgtggcggatgttgggtgtggctggggttctgtggagatgctcctgggacgggtgtatggcagggactgcccctctcaaggtgccctgtctggaggggcagcaagggcgggaggctgtgggtgacactcttcgtccttacgagcaggctgtagggggagcatggagggcttcctggaggtggtggctctgggcctcaagggctgggccaggctggggtggggaccgtggtgggctgagagtgggcgagtttgcacactcatggtccctctgcctccactgccaggctgaccctgggcaagccccttggggagggctgcttcggccaggtggtcatggcggaggccatcggcattgacaaggaccgggccgccaagcctgtcaccgtagccgtgaagatgctgaaaggtgaggagggggcggccaggggtgcagagcagggctgggggcgccgccgccgcctgacacaggccccccgctccgtgcacagacgatgccactgacaaggacctgtcggacctggtgtctgagatggagatgatgaagatgatcgggaaacacaaaaacatcatcaacctgctgggcgcctgcacgcagggcggtaggtgcggtagcggcggtggtgccggctgggcggccctcctgggcctggcagcccgtctgaggagcccgtgtccccagggcccctgtacgtgctggtggagtacgcggccaagggtaacctgcgggagtttctgcgggcgcggcggcccccgggcctggactactccttcgacacctgcaagccgcccgaggagcagctcaccttcaaggacctggtgtcctgtgcctaccaggtggcccggggcatggagtacttggcctcccagaaggtgggcagggcggcaggtgtgggtggagtaggctgggccctgccctgagatgctgggagcagcggggagaggtggagaggcttcagccctgcctcccaccccttccccagtgcatccacagggacctggctgcccgcaatgtgctggtgaccgaggacaacgtgatgaagatcgcagacttcgggctggcccgggacgtgcacaacctcgactactacaagaagacaaccaacgtgagcccggccctggggtgcgggggtgggggtcatgccagtaggacgcctggcgccaacaccgccttcccacaccctcccagggccggctgcccgtgaagtggatggcgcctgaggccttgtttgaccgagtctacactcaccagagtgacgtgtacgtgtcctgcagagctcaggcttcaggggtggaggcgggaactgggcagagccaggaccccagctgcagtccccaggcctgtgccctggagctcctgggtgtggtttctacccctccctgggggcagcagcgcagccctggcctattcccctggtgcccgcccaggtgtctgtcctgggagtctcaggacagcctgacctcaccttcccctgcagctggtcctttggggtcctgctctgggagatcttcacgctggggggctccccgtaccccggcatccctgtggaggagctcttcaagctgctgaaggagggccaccgcatggacaagcccgccaactgcacacacgacctgtgagtggcatccctggccctccactgggtcctcaggggtgggggtccctccggggctgggcgggggagggactggcagcccttcaggctgttcccgaataaggcgggaagcggcggggctcactcctgagcgccctgcccgcaggtacatgatcatgcgggagtgctggcatgccgcgccctcccagaggcccaccttcaagcagctggtggaggacctggaccgtgtccttaccgtgacgtccaccgacgtgagtgctggctctggcctggtgccacccgcctatgcccctccccctgccgtccccggccatcctgccccccagagtgctgaggtgtggggcgggccttctggggcacagcctgggcacagaggtggctgtgcgaagaggggctcggtggcacagcgctcaccccgcctcccgccagcaggagtacctggacctgtcggcgcctttcgagcagtactccccgggtggccaggacacccccagctccagctcctcaggggacgactccgtgtttgcccacgacctgctgcccccggccccacccagcagtgggggctcgcggacgtgaagggccactggtccccaacaatgtgaggggtccctagcagcccaccctgctgctggtgcacagccactccccggcatgagactcagtgcagatggagagacagctacacagagctttggtctgtgtgtgtgtgtgtgcgtgtgtgtgtgtgtgtgtgcacatccgcgtgtgcctgtgtgcgtgcgcatcttgcctccaggtgcagaggtaccctgggtgtccccgctgctgtgcaacggtctcctgactggtgctgcagcaccgaggggcctttgttctggggggacccagtgcagaatgtaagtgggcccacccggtgggacccccgtggggcagggagctgggcccgacatggctccggcctctgcctttgcaccacgggacatcacagggtgggcctcggcccctcccacacccaaagctgagcctgcagggaagccccacatgtccagcaccttgtgcctggggtgttagtggcaccgcctccccacctccaggctttcccacttcccaccctgcccctcagagactgaaattacgggtacctgaagatgggagcctttaccttttatgcaaaaggtttattccggaaactagtgtacatttctataaatagatgctgtgtatatggtatatatacatatatatatataacatatatggaagaggaaaaggctggtacaacggaggcctgcgaccctgggggcacaggaggcaggcatggccctgggcggggcgtgggggggcgtggagggaggccccagggggtctcacccatgcaagcagaggaccagggccttttctggcaccgcagttttgttttaaaactggacctgtatatttgtaaagctatttatgggcccctggcactcttgttcccacaccccaacacttccagcatttagctggccacatggcggagagttttaatttttaacttattgacaaccgagaaggtttatcccgccgatagagggacggccaagaatgtacgtccagcctgccccggagctggaggatcccctccaagcctaaaaggttgttaatagttggaggtgattccagtgaagatattttatttcctttgtcctttttcaggagaattagatttctataggatttttctttaggagatttattttttggacttcaaagcaagctggtattttcatacaaattcttctaattgctgtgtgtcccaggcagggagacggtttccagggaggggccggccctgtgtgcaggttccgatgttattagatgttacaagtttatatatatctatatatataatttattgagtttttacaagatgtatttgttgtagacttaacacttcttacgcaatgcttctagagttttatagcctggactgctacctttcaaagcttggagggaagccgtgaattcagttggttcgttctgtactgttactgggccctgagtctgggcagctgtcccttgcttgcctgcagggccatggctcagggtggtctcttcttggggcccagtgcatggtggccagaggtgtcacccaaaccggcaggtgcgattttgttaacccagcgacgaactttccgaaaaataaagacacctggttgctaacctgg

SEQ ID NO: 13 - DNA, 146507 bp, Homo sapiens
ggcgcccgcgcccgcccccgcgccgggcccggctcggcccgacccggctccgccgcgggcaggcggggcccagcgcactcggagcccgagcccgagccgcagccgccgcctggggcgcttgggtcggcctcgaggacaccggagaggggcgccacgccgccgtggccgcaggtcagagtacgggtgcccgcggcgctcgggaaccggctgctggctgggcggggagtgctcagggagggggcgcggagggctggggccgagggtctgggggctagggccgaggaaacgggaactgacggggtcccagacggatgagagctggggagaagggggtctcggctgaggggtccggggctgaggcagggtcatggtccggcaggacccggactgacgggtcgcgggcgggcggctcacgggtgaccgggtgaaggggtcttgggctgagggcacccgggctgagggtcgcgtctaccggagcgcgcactaggggcggagggcgcgggcacagagagccgcggccggtgccgactcgagtggacgcgagccggtgcgtcccggcttccaggacagcccccctcgggagagcgccgggtgggcgcggagccggggacacggggacctccgcgtccccggcggaggtgcgcaagcgtcgggagccgctccgggggaactttggagcagggtgtctggacccggggaagcgaagatccgcgtgcgtccgtcctgaggccgcgcggcacccctgctgaggaggaggtcccgttcgctgtccagagcccaggggcgaccgccgcttggggaccgggggaccgttcagcgaggggcgcgcttgtagctggccaggccctgtgccctgacgcgttgtgctggccctacgcccggcggaggggctggggacggggactgggtgcctccgtgcctccgcggatggagcgcgcagccaggacccccagccgcaccccggggggctggaaaggcgaagtcgctgctttgtgggctcctgcaagtgccaggcgctgaccactcctcctgggagcctaactgaggggggtagaggcagcagaggttaacagaaatctcaggtcccttggtggaaggtgggtgtgtagtcgtggtactttacgcctcggtgtttagggaggagcctaaggtaaggagtcagaaacggggagtaaccgagctgcggcttttatataaggtcagtggtaggtaaggaaggggccttaacctctgctggtgaccagaagcctgcatttctgcattctgcttaattccctttccttaggtgagttggctcactctcattgcattttgttggaatgtgttggtgataggtccgaaatttgcaaaattattgtattatccttatatcatttttttttgcagtgctcttgttttataagaagaatccaattcacttgggtcataggctaacggttgtaaaaatagtgtcattgttataaaagaaatcaagtcaaaaatagtcgtctgccatgaagaaactaaaatttttcttcttttccttgcaagattagggacaaaatgtaaagtttatttgtgtaaattatcatttggatataaaaccagacaatgataaactgagttgtataatacctattcctggaaaacctctgattttgaagtacattattttaaccccaactgtttctgtcattcgtgagacaaattgttaactggatttattaagagaacaatgaataacttaactctttaaaaggacctgggcaaatcttcgacaggtttcaggtattttatggcagtctttctgtctattgctaagtgatcgattgctgactgagaacagaaccaactgatggtgctagatgatttagaaaacctttctggtatagggactggcatggacattcactgtggcttttctcttaaagaaatacctttcactcctaggggagtttgacagaagacactcatagatgctaccagttagcatttggagtaatatatcaaaacattctgttcaagttttaaagtaagttttgtgtagtatattttcaatcagattcactttggaatcaaatacactttatttgattccaaataaagtgtatttgaatattcactttaatatacgaaactttaaaggtaatgtctcagccaaaaagtgaagtgtattacaaaactgtccatttttgtcttcttgtgtacttcacataatttttctccctgatttaaattatatgatatttgatagttaacttgctaataattatgtcttaagagatctttgaatcaactggtggccatctcagtcttttaaaactcacttgaaggaaaagagaaacactaatgatggttttttttaaaatcaaaaacttttttcatatttacaagtttgtttctagttcttaaacaataactgctgtaaaaccatggcatcagtgaggtataaagttttgtagaatcccaggctgaagactttttggatgtcgttttctcatttctttacattaaaaagaatataatttctttttaaaattaaaactaaaatgtccaccggcctcatattctttattgaacttaagtgctttgaaaatatttttgcgattgatatttttaatgataaaatataatattttctttgaaggactagtttcctaaatgttcatttttttgtatgtttcagaactacttttaaaaaaattctagattatgctttaaattgcaatatttctaaattcctatgacatttaaaatgtgtacaagagaaaaggtgtgacatgaggaatatgaattagaagtggattactaatggtcgtagtgaattgtttttaatcagtgttatataaatataaacaaatacttttttcttctgtaattttctgacaataaggatgttagccactaaccttaattatcaagataattatgtgcatgaaagctgtgtaaaaggcacaaccgtggaacatatacaagtattaataatacatttcatttagttttcaggttataaaatcgttattaataacaagaggctttcatgaagtaggaaaatatgttaaaatgacattttctgaatgtttcacacattctggcccacactttcacttctttcctagcatctatatattcccaatgcataggacagagttggtcattctaattgtgggtgtctttctgctggattcgttgtcacttggacttggaaatacagtatgtcattaggtgtggcaaatgtactggaagaagtttttggtctcataggattccactaaataaatattagctgtagaggatttttaaaaactcactaatagagaaaacttggtgaagtcactagtgtgtaagcgtaaacatatgcaccccccacaactgaatttctaatttgcttatttttcctggtagatctccactttgcttactctctcttaatatcccaaagcaacaaaaagcgcagtgattttaattgcttacaaaggtcctttgaaacggatctaatttgactccacaaaagaatagtaagagttgtgaacaaccatcttgcaagtgtagatatccccagcgtatcaacttcagttagtttcatagcgttctaaatcaaaaatttagatttaagattatttgaaatcttcttggaagttcttacttactgtttgcgttttctcaaaatacagaggtagattgggggagtaatatagtatatgttttaaagctgttatttaactaaaatgtcatgttttaaattttatttaatgcacttaaagtaggttcttgggataaaatctattcagatgcaataggccatgttttggggaaaacttttgtagatgtttagataatatctgtcatcaataatagtatatgtttaaattattttgtaaaaacagatttacatatttttaaaatttctcttcaacaataagtacacatcaatattttaatgccgagaatttcattcagagtatgactgtttacattttcaactgtttcaattattatggcttaggcaagtaccttatcctttctctcaattttgtcatctttgaaacggagaaagtgttgcagttattattgcttgctcttttgctatgattttaaggctttatgagcaaacccatgtactttaaatgatgtgaccatgaccctgaatttaattgagctgatattctgaaaagaaccttcatgaatatctatgtcatagctaactcttttaccaatgttaatagttcactgtagttcaaacctcaataactttgagattgttaagattgaagatgatgcttctcatgtggtgatcaatttataaactgtttctgggaatattttattatcattcaatttaaaattgtattttccattccctgatgactttggacaaaaatcagcatagtaattatttttattccagctttgcgagtcctgtgtagcccctcttatgttaatattatacatccgatgcatctagaaggcacagattgtgcgctttgatttgataaagctctagtctttgcatatctttatggcacaccttgtgaattcttaacgtatattccccaggagcaagttcgttttataatgaggcctaggatccatcagatcagaagacagtttagtgtcacaacttaaaagactaaatagtgacttgtgcttgtcattaaaaatgggtctctttcaacaagcactcaccaaaaaatagtgttttagtggcttgaaaggttcagatatctcctaataacccacctatttgctagtagggagtaagtggaaaaacatataattaactgtgcaccatccaaataataaattttaaattcttcgcgtgaattgttgatacatattgttgtgaagtgtctcctgcttaagaaagtaagggacttggactgaatatgccaaagaggaggcctctgcaagcggtgtcttggtgatgggaagttactggtaacagcacacggggtgatggggtgaagaggcttgtgtgcgtgggccccgggggctgaggattgttggagaggacttctcccaccttctctgggccccaaactgcacactggactggcaagccactctgcccactgcagtgtggagctataaagcccaagtagggacttcactaaaaggatgcagaggcgaaggcaaagaaaggctcatgctggtgcgtgtaggtgggctgagtgtccctgtccgggagtggggagccgtgttatcttccactgccttaatcctacagcgtaggctttctcagagtcattgccataccttcaactgttccagtggccaggctgttctcaacttgaaaatcttttgtgggacagtgccatgaattttttttcctactgcgattttttagatataaaggaattgaatccattaagtggagattttaaaccctccagtcaggatttaaactagattgtgtaagttcagttcagttggattcaatatctgtttaggaagcatttttattccacttcattgattttagaaaataaattcattgcttggttttaactatgtcactattaaaaaaaaaccactttaatttgtggactcatctgggaggattatgtgtggatatgacatattgagtcagattatctgaccttctgagaagagttcagattagcaaaaacgtggggtgagaagtccttcgcagtttgccacaggtaaggagaaggtagatatgagggaggtagagaaatagggaaataccctgagtaggaatgtaccaggtctgtatatgctcaactcccacagtcagcaggttgcatgattactgtgtatagtcttaaaatataaggttgatttctaagaatttaccctgcttcttggtgacattgtaggacatctcagtttgccacttagcactgttattctttctggctctatactaaaggagataatttgggcaagggaatggaaagaggttactttttcatcctgtatgtttaaggaataaattttccttcatatcgagggcagtggagaaatataactgtcaaactgttcgagtgcaatgatgaagttccggaaggaacttcctaaccttgaccacacccctctggctgtcatacacctcttaaaatgtctttgaatttgaatgtctttgaattgaaatttaaaatgtctttgaatttgaaagctttgggtctacttttaaaatgccaaagttcctggcagggttagttcactaaaccactatcagcaaaaatgtgaaaggctagttgcttgtttccttgctacctgaaaacaaggcctttaaggagtagaaaacagatttggagtttgaaagagggggttaggagagggaaaaataaagttaatgcatgtcccagtttcctcataagccagaaactttgaaacaaaataggaaaataaccatttggaatagcagtgataggaaaagatatatttacccatcattttttttctcttagtcaagacaagtcgcagatcttccttgaaccatttttgacctcaaaacagttattctgaaacatcaattaaactaagaaatgtaatcacagttcaagttatgagctagtattatcttaatgtaattaaatatctgaatattatcacttcattatatcttgtatttcctctgtgatgttagacaaattatgtggtctcttcatgagtcaactcttccaggctttaaaagtagcttcctaatagattgaaatgagaggaacttttcaatcacttcagaaaatgatgtgccaaggtagtataaataatgcttaatcctttggcagatccacagatcataaaatatcatacatgcggccagtcgcagtggctcacgcctgtaatcccagcactttgggagacagaggcagaaggatcacctgaggtcaggagtttgagaccaacctaaccaacatggagaaaccccacctctactaaaaatacaaattagctcggcatggtggcacgtgcctttaatcccagctactcaggtggctgaggcaggagaatcggttgaacccgggaggcagaggttgcagtgagccgagatcacgctattgcactccagcctgggcaacaagagtgaaactctgtctcgaaataataataattattattatacatacttaattttatttttgctgaaaatagtatggcaagccagtgcatctctgttagaaatagaaacttagtagccacctcaaaagcaaggtcataattctgtgaatcagctaataggtggtatttagcagttaggtatgggctaccctcgtgcctcatgactaatcacattgcttactcgtcatgcattttttacaaagtcttgctaaagtctgtgaatctaaaacagagaatctcaaagtgttccttactgaatgttatcctttccgtcagttgataattacctgtgtaaacaagcttttgactgcatctagaaaagcacctatataaattcttctgttttatatggtggataaagtttataaaggagaacaaacataagaatgatgtcaatataaatgaagtagaaacttcaaaaatcatttgcatatgtcaagtataatccagaagagtgaagaaaatacccaggcatttggcaatataggattactacatgttttcctaaagaatttggaactgattagaaacatcctgattttatttaaaagcaatataatgtatttttacagtttgttttcaagaaggttcaaaaaaaaattttttttttttttttgagatggagtttcgctcttgttgcccaggttggagtgcaatggcgccatcttggctcactgcaacctccgcctcccaggttcaagtgattctcctgcctcagcctcccgagtagctgggattacaggcgcccaccaccacacctggctaattttttgcatttttattagagacggggtttcaccatgttggccagtctggtctcgaactcctgacctcaggagatccacctgcctcggcctcccaaagtgctgggattataggtgtgagccaccgtgcctggcaaagaaggctcaaatttggtgacttttaggactagagcagtttgatgtctgcaaaaatctagacaccaatttcttgaaggcaggtactgactgaattctattccagcatatagcacaattcttagtaggcacttaaatgttttagaaagaagaaagagctggtcatggtggcacacacctgtaatcccagcactttgggcagctgaggtaggcagatcacttgaggccaggagtttgagaccagcctggccaacgtggcagaaccccgtctctacaataaatacaaaaattaactgggcgtggtggcacacacctgtaatcccagctactcgggtgactgagacaggagaatcacttgaacccggtaggtggaggttgcagtgagccgagaagattgtgccactgcactctagcctgggcaacagagcaacactttgtctcaaaaaaaaaaaaaaaaaaaaaaaaagaataaagaattagtctaaggcagtggttcttaaaatgtggtcctgggatcgtgagcatcctctggcagcttgttagaaatgcagtttcttggacctcatcccagacctgtggtgggcctagcaatctgtgttttagggactctgctttatacgctgtttgggaactcttggtccaagatgattcttgcaccccacctgatagagtggggcccatttgtcagtgtgctttggatgatttctagtaagccttacccttgcttatggttaagttctttgccctatctctctccactcataggatctcttggaaccatcctataaaactacccccattgacctatcatttattacttagaaaagctcagtagtggtgtcaataagcttttgtcaagaggctagccggctcactaattagaccttgcaacactggttctttttagcttagcatggctgcttaggaatccctagtctccgcgtcaaagactacaacttcaaagactggattttataaaatcacagaagatgatcggccctagaggactggttcatgttaaacagatttacaagatatggatttgtaaacctcaattccagtttaataatagtagaaaatattcccttcctagtgattgttgataatagttttttttattttaaaattctataatttcaaggattgaagagatttacactcatatatatctgatgtcactaagatttagttcaggttacttagaaagcattgggcaatgttttgtaacttttgggactttttccaaagggctggagaatataggaaaagccgtatacacgaagagtttcataaaagcattgttataagaacccatatttggaagtaacttaaatatccaacagtagggagatgtttaaataaattatggtataatcaatagttaaaatattgtacagttataatgacaatttagaaactactcacaactctgaagaatatttaaaaagtaggataaaaaatgtgtgtgaactattgattggaaccttacaaaaatgtatgtatatgaaaaagtctggaagagaatatacaaaagtgataatagttatgttacagtagtgagatatggagggctttttgtttgtttttatatttttctctctttcccaaagtttattcagtagtataaaattacttctataatcaaaagcatacatttatagcttttttttctttttggtgtgtctgtgcttctgatagtaaagatcaaggcaatatatgatttttttcctattatacccaaaatttattttatactaaattttatttcacatattggacttccctgtacattttacttgcctagtctctatttggcatggggaaagaaacccatctctgttatggcctcttaatgttctcagccatacgtaaggtttaattttgttgatttgtttgggtccgtgatctacttgatctttagcatatgctggcaaatagagcttttaaaaaatagtttccagagttactttcttttaaagcccttctctctttatttttttctaatttttttctattatgttcctttttttctaaaattgaatgacctcatgatagagttacccagttttcctgctgctgacagaatgttgcacttataaatagcagctgatgcagatgcacagaaaggtaaatttctgttacaaatgttcattatgagcccttcatataatttgtgataataattttaaaaataaaaagaaatgggccgggcgcggtggctcacgcctgtaatcccagcactttgggaggccgaggcgggcggatcacgaggtcaggagatcgagaccatcccggctaaaacggtgaaaccccgtctctactaaaaatacaaaaaattagccgggcgtagtggcgggcgcctgtagtcccagctacttgggaggctgaggcaggagaatggcgtgaacccgggaggcagagcttgcagtgagccgagatcccgccactgcactccagcctgggcgacagagcgagactctgtctcaaaaaaaaaaaaaaaaaaaaaaaaaaaaagaaatgtaaaatagcaagcgagtagaggtttcccaaaatcagtgtgaacattgtgaaagttatatatatgtatagacacacacacacacacacacacagtaatagcctttgaatgaattcttttttcatcttttctgttgcattgtcctagaaatcccaaaggagaaagttaagtggttttgcctttgacagcggttacagattacatttttcttgtcactttctttgggacttcttttgtgaaacttgtggcatgtcctagaataatctttatcttaaagttttaaaaactttttagaaatttcatatcagtgttataaatatttattctgtatgcctccccagtttgggatgatttcatccttaatgataagccaagacaaacttcagctaacaatatttagtttatagatcttagaatgtgtttatgggtaaaagaacctcgatgtgatgataccttagagaatagatctactgagactgatgcgttttattttcatttttgtattttatttatttatttattgagacagggtctcactctgtcacccaggctggagtgcagtggtgccatcatggctcactgcagcctcaacttcttgggtttaagtgatcctcccacctcagcctcccaagtagctgggactacaggtgtgagccactacacccagctaatttttatattttttgtagaaacaggggttcgccgtattgccaggctggtcttgaactcgtaggcccaagcagtcctctggcctctgcctcccaaagtgctgggattataggtgtgagccacgcgcccagcctgaagctttttttaaatgaagatttattcaacaaatgtctattgagccacttatttgtgccacaagctgtttcagataaggaggataaagcaatgaacagacaaattccattcctccttgagtttacaattattgttatctagatttaacgagaacatttttcaatgggaatgacggtgactaagagggggtgaatgggcctgtgtcttgtaactagatggcattgctaggcaccgtggactcagggggctctctctgagattggtatagtgtatgggaaagaaaatctgtatccttgaatattttttcccagctctcttactatcctattatcttaggttatgttgcatgtattctatattgtatattatgcataatatatttataatttctgtctcagtaatgaagtgatttcagaggaggtaagaatgaatcctttgctaataagttattactttccttgaaaatccaaatgacaagaggattattcactttgcaaaaggattatttatttttataatgttttcacagtagatttaagtggttaactattcaagtgaatttaatttataaataaatcaattaatttaaaaaaattatttaaccctaagaaaatgtaaaacaaagttcatggagactgtcccattaacatcaaaaaaactttttttcttgggagataaagttggctactttctctttaaaaggccattacaaacttttacaagcttagaatataatatttgcgtaaaaggagacccagatcctattttaaacgaccaaattattttgatcaaattacttactatagctattttcaatgtctgtattcacaaactgtttactatttcagttctgttttcaagttgacagaaaatatcatattgaccacttagaaataaattctgaaccacatgaattttttgggaaaaaatgataaggaaaatcaattttgatggactttatataaagttaaatagaattaattctttcatatatacagggccgtgaaatgttacagtgtaactcaatacagatgtaaccaaaaccttcaaattttgcaaatttcaccagagttaatttgtttggttctacaaacatttaccaaatgaccactcattaaacctgcccacctatgaacatgaccttataaaatggtgagacatagcagtatctggcactgggcacacagattaccacagctcaataaaagctgagaaaatgactcagtgattgaacacagcgcattgccatggttgtgtctttaagccattcatgtaattcatgctgtgtattcgacttagcctgctgtatgatctttgatcctaaccaagcacaatacagccacagttaatttctttttatcgtgaacattaaatttttaaatgtcaggttgactttctttgtcctataacttgtgtatgaaatatttatcctggtcccagcttttttttttttcattctcaaaggaggtgaaaccagcttttgaattcagaaaatgcagactaatattaatatcagccaaagtaaaacataattagaaggcagatctactctgaaatggaatctgatatattccatgttctgtgttacacatatttgctgattatttgatgtcatgtctgataattttcatgggaaaattccatgtaccaagcaaaattgttagttcctagagggtaagaatgtgtatagtagttctcattctctttaccttgctgtgcactgtataccttccctaattcccagccaaactgggtgcactatatacactttttaatacttttcaacttgattttattttgaggacaagtgtgtgctttttcagtatcacttgtataggattctccacaatcttagggaatttcctaaactactctttaaaatattaattcctattttatgtattgtttttgtgatacataatgatatgaaactaatgccaggagaaatttccattttgttattctaaagcagacaaaatgggatatgaaagggaaaaatgttaattatagacttcaacattctatgttggacctcgtagttgttctggtcagaagaacaggttttttaatggcctaagggccagagcattgttttgcattcttgtttggagactttcaatggcaactgtaacaaactctgcttagtaccacagttggagaaaggtttacaataatgcccagtacaaaatgttattcagacttactactcatgcataaaataaaactggttctcttcttaaacttcgttacatattagataaaacactatcaagttttggcctcatttgttcataatatgtaatttaattcagttgctcagctagttcatatatgaatcacaagtattatcatcacaattatttaacagttaatctccttttatagggtagatatgtgttaataagcaacttcaaaataccaaagaaactgctttacatatacaagcaaagcaaatagatggaccttgtgacatctctggacaaccagtcttcttggtaggccttcatctgtgggtgtagaacgaaggtaggagtctgctcactaaagatcaatgcaaggaacttccatgctctccactgctgggcaacctgccattctcctcctgccaccacacctgttcagctactagggcaaagaagtgccctgctagacacaagcagatgcttctcttaccaagagaagataatataaggaaggataaagaactgaaacaggtttgaggctttctcttattcatcatctagacttcagttttcttgatttattattccttcatgtcttgccagacacaacagttgcacatgtgttcaagttggttctaggcacaaagggagataccagagcttctgtagctacgagattatcatctgcgtgagccaagaaggggtagtgttgaaacaggtaactaacaattcacagcagtatgtgattaagggctaaaataagtaaagggagagaacaaatgctacagaaattcagagaaggctaagatcagtgtggagtggagggtacagccaggtaaagccttgtagagaaagtgggaattgaactaaactttggaagctcagggattgacaggatagcctcacgaaaaatactaaaaacaatacagaagaagaaacaagaagggaattaaaggatgattccatttgtacaaaatatcccgagtaggtacatccatagagataggaagcagatgagttgccaggggctgaagagaaaggaaagggggagtgactgcttaatgggtacaggatttcctttggaggtgatgaacatgttttggaactacacagaagtgatgattgcacagctttaagaattactaaataccattggattgtacacacttcataaatacattttaaattgtgaattttacctcaaattaagaaaaaaaaagttcctggtttgaggtaaccaaaagagaaaataatttccagtataagaaaacaaagcctggaatagcaaataagcatagagttaagggaaggtttgcagagattaaccagtttgaagtggagagtgcgtggatgtgagtagtgagaaacatggttggaagtgtagattttaggccagatgataaaaggtctggaatgcaggagaaggagtgtgggttttatctcaggagcggggagattccatatcgtaagaagaggggtgagatgattgaatcagaagattaatttggcagtagcatgcagggaaagcagtcaggaggctgctgcaaaatccggacataccatgaggagggcctgtaagagtgaagtggaagggcagatgtggacgatgctctgaagcagagaatgatgctcaaagtgtggtccgtggcttgatgctgccccacaagtgttagttacagacctggcacacagtaagggtagatttgagggtaagtctttaaaactttaatattattatgatattcaagcgcatgattttgcatttcatagcaatatccacagtaggtgtaagagacaagaaaacttccttcatgccagagttagaagaccgctgccctaaaggatgaatgagtggagttgatgactgactcctgtagggcagtctttttttttttggagatggagtctcactctgtcacccaggctagagtgcagtggcacgatcttgactcactgaaacctccgcttcctgggttcaagcgattctcctgccttaccctcctgagtagctgggattacaggcatgcaccaccacacccggctagtttttaaaagtatttttagtagagatggggtttcgccatattagctaggctggtttcgaactcctgacctcaagtgatctgcccgcctcagcctcccaaagtgctgggattacaggtgtgagccactgtgcctggccaggcagtcatgttttatggctcctttacagtgttccaccccttgtgctagacactgggaccagagcagtaggcaagatggactggcactttcccttgtggagctcgctgtcacataaatagtccttctttgtcaaaggattgctaggaattaaagggaggtctggttcagctcagcataaggaaagcattctaataactacagctgtcccatagtgggaaaggatgatttgtgagaaagtgagtgcttcgtcattggacatattcatgcagagtctgaatcatctctcaagaagtcttgctttggtgggagaaatggagtgggtgacttatcaggtcttgtgtaactaaggtgccatgattccctattctctaatgtgaacttagtagaacatattttcttcataactggctgtattggaacaccagtacatatactaagtttctgtctgtttctattagcacttggaattacagttacctaaatttacatgtagattcaattttgaacttatctgtacagttagttccacaattctttttaaagcaagtactattctctaatgccttctcagacattcacttatttccaactttaatatttatagtaagttcctctttcacgtgatgtgtgtcacaagtcacgcaaatttctgcagaagtgagttacataaattgcagtcaagctgctgacctgtaaatcattcattcttgcccccgtgatgtcatattggggttgaataagaccaggcgtgactacccacttgaggatgtctttgggatgccattttaattgggtgaaataacttttattattcaacttatgtgaccagttactgcaaacgtcaaactgttacgtttaacagctagaatgatcataggttaattgcactttagaggatgtggaggacgtagactcctataggagtgatagccttactatattttgggggaaattctagaatgtttttaactcaaaggacattattttcatgaggatgattttaatgcttatggtatcaggtgaagaaaaatgttagctgcagaagaaaaaaatttgtttcacttcaagtctagtagaatattttgttaaaatagccaattttcattatgtattattaaaacaggttatacttttcattaagatgtatgtaaaaatttcacatgtgcctggtattacacagtatttacccaataaatatttattgaatattgttgaatgaatgtgaggtgagggcggagaaaatatttcaaatggaaaaatagtatgagcaaaggaaaacgtgaatacagaaagaagcaaagatagtttctttaaagtcgcatttatatgtaataacaatgggaaaactttttggctgagtaattttggtggctccttaatttcttaatatttaacaactaatgacgactctctctgatactgatatccaaagcaaatagctgaccttgaacatggaaaagttactgcctctgactaattggaatgtctgagcctttcttgtcttctatcttctttccttcctttcttcctctctttcctcctcttttcccctcaattgtagcactagctcttgttcttgttccctctacccttctcccctttttcgttcctggtgttccctatgttttcttctttccttcttttctgtctctgtttctctccctctgaatttctgcttcctttcctctctttcccaattgctactgtctctgcctttggttgtctctgagtgtaatatggaagtgaagtatatttttatctactaaacacatgatcaaatagggattttttattctgaatttaacattaacagaaatgttatgttgctctttatgagacgaaataaagttggatgtcacttataaatggattttgattgatttttttaaagtattgactcactaatcttcaaattggtagaaggaggtcagtagactttgactcataaatttttgtaagcgtaatggcttgttgaataactcctaattgtctttaacaaccttggtttctgtcctcttttttccaaatgcagatatagcagatgtcttcagcatctaattttttattacactttcatatgtgcagtcatacaagagctggagtatttgttttgttaattctgtatctttattgtctagaacactgctaacaaatagcagatgctcaacaaataattgttgcttaatatttcaaatctgtagtgtcattctacctcctaatcccaaatagccatcataactttttagactaacattactcattaaggtaacttagtatacaatgaatttataaatgtaaccatacaatttcatgcttagagaacgttttctctccattctctctacctttagaccattctgcagtttaaatcttgaaccaaaatgtcatttaaccatccttctgaacgataactccataattaactcaagcaccaaataagtcatctagctcttgatggtaataattaatatttgttgaatgcttattctatatcaggctctgttttaagcacattatatacattatctcattttattctttcagcagctatgtacaccagcagtcccccacctttttggcaccagggactggtttcatggaagacagtttttcaacagactggtggcaggtggaaatggtttcaggatgaaactgttccaccttagatcatcaggcattagttagattctcataagaagcatgcaacatagatccctcacatgcacagttcacaatagggtttgcactcctttgagaatctaaggctgctactgatctgacaggaggcggagctcaggcaataatgttcgctcgcccaccactcatctcctgccacgtggcccagttcctaacaggccatggactgctactgcttcacggccttggggtgggggactcctaatatacagtattaaagtcagatgaagaaacaggaacagagaggtaaaataacctgccaggtgataaaaactaggatttgaacccagacaatctgaacccagccaccctgtcatgcacaggagcctactttgcaagtatttggccttccagggaatgagatgtccacatcccatcaccaccgccaccactattccacatttaacaattagacctatacaggtgtaaccatattcacatgtaacagtggattaaatttaaacttttagttgtgttaattcactgcaaatcagcttatgtgtcttgtaagtagtaagcaacttgaaagtacctgttgttgcttatgacaagataaattagatcaccaaatctttatatttagtaacttcatcatcacttagaaatcaaccgctgggccgggcgcggtggctcacgcctgtaatcccccagcactttgggaggccgaggctggtggatcacgaggtcaggagatcgagaccatcctggctaacacggtgtaaccccatctctactaaaaatacaaaaaattagccgggcgtggtggtgggcgcctgtagtcccagccattagggaggctgaggcaggagaatggcgtgaacccgggaggcagagattgcagtgagccgagatcgcgccactgcactccagcctgggcgacagtgcaagactccgtctcaaaaaaaaaaaaaaaaaaaatcaaccgctgttaggaaattctttttttttttttgtctctcttaaattcctcttaatctaaataaagacattttattttgtctcaggatacagaggtcaattgaatatagcaaattttgtcagtgttgtaaaaaatctggagaggaatgtaaacggctcatcttgtgtctggcctctaattgaatcagtcagctatggtggggttaggggacagatccgtgtatttacttgcataggacaaaaattagtcatttgtgagtgttcacatacttccacctctcccaacccaccaaagagaattgtaatttgacagtacaataatcccttcccctactcttaaaaaagttgatcttacaaggtcagtcctatgtttttatgaaaaagaattagagaatgagtagaaaggaactagtcaagaaaagcagaagatttgggttgatagacataaagtgctgggaatgagaggaagagagagagatcgtgaaattcctgggctgggaataaagactgtgtgtaggtaggacagcctttggtgaaggagacactttggagagcatggtgtgtgaaaacacttaaaggaaaattaaagggaattaagaggaaattgaagggaaggagtatatgagaagggttgctttgtggttataagctgaattttctttaatgtattttgaaagaccccggtaaagaaaggaatttcttttaattttgcagagaatgaggagttgtccaattaggtgttgaattgttcttccttggaactctcaagagaggagttgtgtttagagatagatttgggagctgtaagcaagtagatgtgttatgagtcacagtgctgagggcaagaatataaagaagagatgaaggccaagaggaaacttagagaacacaaaatagaaaagctcagaaagcaggggtaccaggaaaagggactaaaatagtcatcataaggtaggataataggaggccgtgcacagtgactcacacctgtaatcccagcactttgggaggccaaggcgggttagagatcagcatggacaacataaggagatctcgcctctacaaaaaaatgaaaaattagccaggtgtgatggcgcacacatgtagtcccagctacttgggaggccgaggtgagagcatcacttgagcctgggtggttgaggctacagtgaaccatgatcacaccactgtactctaacctggatgacagagcaagaccctgtctcaaaaaaaaaaaaaaaaaaaaaaaaaaagggagaaactgatttcaaggagccaagaaaagagacagattcaatagtggaggatgggcaaaatatcaaatgctgcagaggcagagaccgtggtgtgctggagccacattgttaaattttcacaattttattgagccaatcgttatgcatgctattattaaaacttaaattgaatacagttaaacaaattatattaaaaataaaagtaataaatacacaaagcataccacttccttattactttacattgctgagatgattcatgcccatggtatctgagtagtggaaatacactgtaatatttgtgctgcttttaaatcagtcatggtgggagtatttacaccacaaaaattggcaaacactaccaatcagggcatttttctctgcaaagagagccagttaaatatttaccagcatgccactgagaaaatagaattgaagtcaagaaaagtctaatggatttagcaagaaggagatgacatatacttaagtttcagtagaaaggtaggtgacaaaaaccacagtaaagtgggttgaggagtgaaataataaaaaattaaaaacatgtgttcaagtaagtttgagaaccattgaattaaaccgagaagcagattgttattgttgatgatggttttgttttttaaattacaaggtttgcagagtacatactatgctaatgtactttattaatctccaaaaatgaagaccatatgcaaatttattttatggtagaaccttttctgttggaaaatcttagggaacaagttatctatagaatacattttgggaaatgctgctcttgtatttcacaattaagatgatactgattgtaaagtttgagattaatattcttgtttttaaagtttcatgctttttaaaagaaattttgtcaagaatggatgttgaattttactgagtactgtttttgtcgtttttgtagtaatcatacggttttttgacctagtgctgtgacacattttaatagattttcaaatattaaatcctctttgcctttctgagataaatgtaacttgattatggtggttcattattttaatagaggatttaatttgttaattaacattttatttattatttaaaatcaatattgataagtgggactgatatttttctctgttgtcaggttttaatatcagtgttatgacactccagaaaagttaattatgtcactatattttttcctactgagaaacagcttatgtagtaagaaaatcatctcttccttgaaagctttaaaaaatcaactataaaactaatagcttttggaggaagtaattctttgataagttttcaattatttccattgttaattatttttctgtatcttaagtcaacttcaccatttatttcatttcagacaagttagtctgagtaaactgcccttggcctgccttattatttacttaggttctggtaaaaatcccatcccagatgtaaaatcattgtgtgagtagagatgaacagcccctgtctaacgtgggctgtgtttaagtgtgaggcaattgtctgctgtcttcacagcccagttctctggcttctagggatgatgggtagggtgtttataatcgaatgaatataaactaatcttgagttaaatgaccagatggcagaggtgaaagaacggcaatccttggtgtctactccccccagaatggatcttgtctctgccctactgtgtttcacatctggggacgattccttctaagatacagtgcagttctgaatgggttcagaaggaagaggactggtagcaggagggggtctgggggaaaggttacctaaatctgcctgactctgacagtagtaagaaccagccaagtgttctgtttgatccgacacttggggctacacactaagaatagataccagtttctagaaatctttactttttgcccatctacttctgaagaaatacctatgtatttcaaaggaaaattggcacaagtatcaaggaaagctggtacaacttaatcttaacctggaatcaactcctttaatttttacatacagatttggttccgttttttagattaaaatttttacctttgttttcacgtatttgagccctttttttttttttttttttttttgagacagagtctcgctctgtcgcccaggctggagtgcagtggcgggatctcggctcactgcaagctccgcctcctgggttcacgccattctcctgcctcagcctcccaagtagctgggactacaggcgcccgccactacgcccggctaattttttgtatttttagtagagacggggtttcaccattttagccgggatggtctcgatctccagacctcgtgatccgcccgcctcggcctcccaaagtgctgggattacaggcgtgagccaccgtgcccggccgagccctttttaatagttgccttaaatgtaaaaaaaaaaaaaaaaaaaaaaaaaaaaaaaaacccaagtggtaatctgtcatagataaagtgtttctcatctctcatgtgttttgcctgttgtgtgtaatgagcggtttcgctgtgggtgctcctttcatttctggctaacacattagagtgtgtttatgtaaattgctgtgatactggtcagcagtcacagccagaaaacataaaacatgtgggcattacacactgacacattagctctttctaaagaagaacatgtcccattctgaaaagaaaattattgctttgtttttgatattgagtctgtattaaaattttttttttatttttgagacagggtctcactctgttgcccaggctggagtgcagtggtgtgatcatagctcactgcagccttgaactctgggactcaagagttcctcctgcctcagcctcttgagtagctgggactacaggcacatgccaccatgcccagctaatttttctgttttttgtagagacaggatttcgctgtggtgctcaggctggtctccaactcctgggctcaagcaatccgcctgcctcagccttccaaagtgaaaaggttttctctcatttttcaaatagaagtactaaacaatgccagagaaataaataaacaggcaaaatacgttggctatagtttatattatttcctgctacagttaacaaaatgggaaaacattttatcttcatggtctactacatttatgccatgtgttaagtaataaaatagcttttgtaaattataaattaaaaggtacagatttaaaagagaaaatactgtagagtttcatgtaggtaagactgtgtagaatgtcgggtctcgatgttggcgctattcaagccctgatgataaggcttttggcattagatgctgttttgtcttcatggaaaatacagctattctaggatccttgagcctttcataagagataaggttgtgaatcctaagaccctaggaccatttacttagatgatctgctctctggttcgtcctctgaaaagtctgcttcgtgaggggtgtgctgcatttgccttgcctaagtggtgtggcacacaactgtactgtcaccttaggcttaataaccatgtgtcatctagaatgaagttatattttactaaggatcgtttttgccatgtataacttctcaaacattaactttcagggttattaatccttttaaggtctagtttttcttaagtctgtgcagtaatagaggtatcgtcattcatgtgacataaaagatggaaaggggcttcattcatgttagtgatggaaataggaaagtaggtgaagtgattctaatagatgtttcttttatgaaataatttttaaaagattctccagccctgcatgatttatgatgaatcattttgtggtctgttagttacttctagagaatagaaagcattgtaggctcagggaaagcaaacattcagaatgaaatccaatagagaaggtaaatttatttgggcatgtacattttggcagcctaggctgtgtacatgtgtacacattctgaacatgtgtgtatattgaaaatcttgtctcttttttattgttaagatttgaaagaagccaacactaaaccacaaatatacaacaaggccattttctcaaacgagagtcagcctttaacggtaagtaaaatcagaatttatactgcatttgtattgaaaagtatcccttttaaagaatatgtaaattatacattgtattttattgtaaaatttcctagagagtgatttttgactattataatactttctgctatataattttccagtcagttggactatgcagtgtaacatatttgtctaacacaaaacaaaggtaagataggaaaatgacctagaagttgagaaataactcaaatccttaaaaatgaatctctaattaaagtcttttatattcatgttatttttctacttaagtaataattacattattttagattcttatgatacttttaattaaattgagataaaaattaagatttctttcatggttccctattggccatgcagtcataatctgtggtcacaaaggagaaagtagcttcgtataagccaaatgtgctccattctaggaggaagaattgctaagttatacccggcattaaaactacttccttcctggaactgactagatgggggtaggatttcagaggctccaggggctcccaaagtttcgggatatccaccatggataatttatccttccgaggcctaactatagggttccaagacagttcttagtccccaacttttttgggaaggaaaaggagacctgtcactttaaggttttatgtagttttaggactattgattttggtaaatcatgagctatcacagaatagctcattttcctgaaatctgcaaataaatgaaatccacaacattgaataaagaatcatcagatagatagatacagaaattaatatagagatgtgtatatatgtgggttattatacatatatatgtttgctaactctgtctgcttctagaggacctagaagcagtgactccccagtagcaaactagatcgtggtttccaaatacaggctgagcatcccaaatctgaaaatctgaacttcaaaatgctttcagattccaaactttttgggcatataggtgatgctcaaataaaatactcttggagcattttggattttggatttttggatttgggatgctcaacaagtaagtgttaagcaaatattccaaaatccaaaaaaattcaaaatccgagatatttctggtcccaaacattttggataagagatactcaatctataccatttttccttaaaggaaaccagagctctttggagaagtggttaattctaaggctggggcagggaaaatacaggctgagcctggaggatgttgtggtcagcctgaaagagctcccagtggccaaagctggaacaatttcatcaataaaataactacgtataatattgaattataatctgatttataaataaaatgtatacacatgagtccaaattgatatacataaatgactgaataagtaaataaatggggggagaagaactctttcttgtagaagactttaataaatgtaaaaggaatgagggaaatagaaaattgttgtcacaaagccacagcagtaattgctgcatgcaacttccactaatactaaaattagtgaggtgggccaggcatggtggctcacgcctgtaatcccagaactttgggatgctgaggtgggcggatcatttgaggtcaggagttcgagaccagactggccaacatggtgaaaccccatctctactaaaaatataaaaattagctgggtgtgatggcggatgcccataatcccagctacttgggaggctgaggcatgagaatcagttgaacccaagaggtggaggttgcagtgagctgagatcgcaccactgtactacagcctgagcaacagcaagactccctctcaaaaaattaattaattaattaattaattaattgagtgaaagtttaaggtgaaacagaatatttgcataacctcaaagtatctgcccccacttactcagtaattacaaaaggaaaaatagtaactttacagtggagaatcctgatggacaccaccttaaccacatgatcaaggtcaatatcaaggatagtaagacatagtgagctcatatgcccctgatagaatgtcctgaaaaggacagatcatgcctttcgaattcttcccaaacatccttaatctcatttgactatgagaaagctttaacctaaatacaaacacattcttcaaaatatctgaccctcgccgttcaacagtgtcagaggcataaaagacacatctttgctaaggaatcactacagattaggaggagaatattgcatgacaattaaatgcaatgtgggatcctggattggatcctagagctgaaaagggacgttagtaggaaaactggtgaaatccaaatagttatagtattgtgccattctcaatttattaggtctttttttgcttttattattatttttaattaacatataattgtacatatttatgtggtacagtgtgacatttcaatacgtgcatacaatgtgtaatgatcaaatcagggtaagtagcatatccatcacctcagacacttatcatttttttgtattgggagcattcaaaatctgctcttctagctattggaaaatatacgataggttgctgttaattatatttaccccacagtgctatagatcattagaactattccttgtatctaactgtagttttgtgtctggtaaccaatctcttgctatccccagcccttcccagcctctagtagcaactattctactgtccacttttatgagatcaactttttaaacttcgcatatgagtgagaacatgtggtatctgtctgcttatttcacttaacataatcaccaccaagctcatccatgttgtcatgaatgacaggatttcattctgttttatggctgaatggtattccatcgtgtatgtgagccacattttctttatccattcatctgttgctggaactcaggtggatgctgtatgttggcttcagtgtatcaacactgataattgtgctgggactgcactgtggtaactggggggaagctggctgaaaggtatgtaggaactccctccactatctttgcaacctttctgtaagcctcagattatttcaagttaagtagttttttaaggtcacaatggagtcactaaataatcattctcattagattttcgctaatttatagaggaagattctgcatttgcaaatcttagaacagagtaatgcaggggcattcttttcatcaagactatttcttgagctattttctaatccttctcatacacactcccatccctacctctacaagtctggtctctatttagtgtacttaatactttagccagttgcttacagccctctagaaacctgtgagtgggaataactccacaaagctctgcctcctcgggaaccacatcttagcagtgttttttgttggtgacagtgagggtctaatttgaatgttcacaccagaactgtcaaagtatttcatgcaatactttgaaaaaaatctcttgatccaccaatcatcattacccaagacaggatttgaacaagaatttagaactcgtagtcttatatttgtttgaatgggaagaggagagaagcagaccgtattgtttctaggcaaaatgtctgggaattcagtgaatacaagtagtactacgggaactttcattcttaaaggaaatcaatgacagcattaagttgtctagaaaatcagtttaactttagaaaagcataaagccgtttaaaatcaaaagagcaaactcttaaaagacaaagttaggagcaggtacgtactttggcgtctgaaaatgagcggtctaaattcaagcattttgacatgaaaaatgaaatgtgaagtatttggaattcaaccctgaatttttttgccggtaactcttgtgtatgttcaactaatttagcaaactgcactagttcacattttttaggtgaaacaagaaataacagaagttgcacctaaagtagtcaaatttcgtagagacagaaagtggaatggtgcttaccaggggctgcggcactggaaaggaacggggagttagtgtttaatggggacagtttcagttttgcaagatgaaagcatcctggagaatggttacacaacattgtgagtgtacttaatgccattgaatgcacacttaaaatggttaaaatggtaaattttatattgtgtatattttatacagttttaaaaactaaaaaaaaaaagtaacaagtcttcagcagttatattccacttcattgccagggtgtctggctctaaggggaatctctgcttagaggaccattaatccttaggaacctttttttttttaaaaaatctaaagatggttcctggacatcatttaccaactggcagtttaaatggcctgtgtaccataaattgtgaggttaaaaaaaatctggtacacaggaaacagtagagctgggtggctgggagagttgcttttggggttaatttataactaagacaaatgaatctatgaaaagaagaaaagccccgtaagaaatatgctaactgatggtgagggagaaaagggtttagataaaagatatctgaacttgtttggtctcagtgattttatgactgaggaattcaattatagatgtactggatggagcaaatcacaattctgtaaattactaataggacacaacgatctttatcattttctgtatgtgctcacatgcaaagttcagtcctgccctctgtaaataaactctctgcctagctatacccatgctatgaattcagggcttgagtgttgaaacataggcaatgcttactgccccaaccttaaaggcaggtggaactgagattaggaacgaagacaaattacttttgcttttgaattttggccttcgggtttgtttcatttttgttcatttcttttcatttttattactaaaaagctgattttttaaaataaaaagatcacaaccacacaaaaaaactattcttctgtagtttcttccagttttgttcacatgtgtatgctttttatttactgacagttaccgtatatacatcacttggccctcagcctctttcactgttaggtcctataaatttttcatttctacctggctttcagagttttcataatggcaacataatcttagtgatagcacgtaatttactaagccagtttttaggtggcttctggtgtttttattattgtataattatgttttattcttataccattacataccatgaatatctttatgtaaatatttcactcaattaaaaaaatattttcttcagataaattgccaagagaggaatttctttgttaaagtgtttgagcaattaattaccttactcttgcattattaattttatgacatttcaaattgcttggaggatatattaatagcaaatgaacaaaacatacaaagcataaatatattttggaaatacatttaaatgatttctgttaatttaaatgaattatcatttacttaaggctttgggtgtatgatagtggtgggaggctggagagtgaagcgcttcaatagttgtttagagattagaacgatgtgagtggtttatttttatttttattctttagaggcagggccttcctctgttgctcaggctggagtgcagtggtgcaatcatagctcactgcaacttcaaattcctggactcaagtgaccctcttgcctcagccaccggagtagctgggactacaggcacacaccaccgcacctggctaattgctaaattattttcagagatgaggccttgctatgttgctcagactggtctcaaacgtctggcctcaagcaatcctcctgccttggcctcccaaatggtgtttttttaaaaaacccagcttaatagcaaagaagttacagattatttcctgaggctatgtcaaatttaaataaaatgtaaagactgtgctgtgggtcccttaccacctttaagtctaagttgctagttattaggaagaaatgattgcttttgaaaatgcagatttaacaaagtaggactttcatagagataagttcaaatcagtttttaaaaaatattcatttaaaaccaaatatttttaaatttgtggtttgaatatttgagaaacaaatttaagaataaagatacaataagaattttaagatacaaaactatatgtttacaatatattaaaatgaataggaaaaagattatgggtgaaactctctcctttttattctcaactttctgtttgggggttcagtgtctccttccacagttttctttgcctcaaataaataaagccaattatgagctctacagtctgagttatagtattcttggttctttgggtaccgccaataacttatatatcacaaataatacatatacagtgttacatagtaagtgctcaataattggaagctagttccatggggcaaaaggaaagcaactgtgttctctttcatactgttctagttttttttttcctttaagcttgtgacttcttgttcttcagtccagatcctgtgatctgaaataatttaaattattaaaagttagatatttttaaccttttatactcccactagacaggacataggaaatttagtgacgtaagcatctttaataatccttaaaagtcataagacttggtggctgggacaagaaacaattaggtataaatttcagggaaataccataatggcatgacttttgttttcttttgttaacaagccacatggctttcctctcaagcccaaggaatacatagtgtgctctccttttaagatttcagttttgtctgcatcacagagatgtatgtttccctaagtttgctcactataatttgtgattgctatttttcttatctgcgaaggaagtacagcagctcccactggggaaataccatgttaagttgatcctaaaataagaaatctaagggaaaggtcacatcctaataacttgtgcaaatctaaattcccatggagctttgcaatcattttgtaggagtataaaaaatctattattgaacttcttccagatagcgtcgtaaaattgaagtacttttatatacagaagtaaccactaaattataaatacaattgacaagacctaattttttaagcaatctattatgaatacgtagagaaatctggcatgactaataaaccacaaaatctttcttgtcactttcactggaaatataaagtatattactcatgaagtattgtgataattacatacaatagtaatttcctattactatagagatatttaatactcaatttttactttttttttttttaactgatgctgaccttttagttatactttggaagaaccttaaccatgttgttccagggaaattcactgctttgggagccaggtcactgagttactactgtctttcctcttctgttctttggccatcgtttaagtttccttacctgttaagtaagaaaggtttatgttaaggatcaagtaagatcaaatatataaagggtttagaaataatttacggcgtatatttatggtattactgtaataattgccttgacttttttatcttttccaaatgaataaatcaaaatagaaagaggttgagtaacttactcgagctaacagtcaccggtacacgctaatcagtgccccactcactggtcaaatctaagtaattcttcaagggatggaatgtaaatggaaactgctcccttatgctgcatacagaggtattacattttgcagtaaggattgattgtttcctagcacgtagtaactaacctgttttgaggatgcgttgttagaaatgcatcttggacatttatgtatatatacgtgcatatatatatgtatgtatgtatgcatgtatgtatcgctagaggaatgtgcgtccttgctttcttactacaaattaaagctgaacagaatgtggtgtttgtcttttggtattgtctgaataaataccaatatctactagtatttatttccttgctggtaataatgtgttttcattaatttaagatttataggaacatacttgggtgctctgcctgctagaaactgatctgtagcatgagccatttgttgaaagtacttagatatttctgcatttatttatttctgtttcagaccccacaataactatattactataagaaatataggccagacacagtgggtgggtcacacctgtaatcccaggagtttgggaggccaggtgggtgggttacacctgtaatcccagcagtttgggaggcccaggtgggaggatggcttgaggccaagagttggagaccagcgtaagcaacatagtgagaccctgtctctgcaaaaattaaaataaaaaaattagccaagcatggtggcgcccgccagtaatcccaactactcaggtggctgaagcaggaggatcacttgagcagggaggtcaaggctgcagtgagccataattgcaccactgcactccagcctgagggacagagtgagaccctgtcaaagaaaaagaaaagagaagagaagactaaattgttttttacatgcttatctatgtgatgtgagttcaaagaatctctgcaatgattcaatatctttttaatatttttgtttgggaaaagcattaagctccttcattgtgttaattaattcagttttctcttttatgttatacaccagcatgaaaagtgtgagatgttagaggcccacatcagtaccctaccacatatttaccaggaaaagctgactttatgcttaatggcagcagtcacccctttaaaatgtgtggcctctgtgtccgatggcgtggactcacttcctttaagttcatggccttctgaagatcagctgggctgggatgagtggtggctggcatgtggtggagtgtcttgcttccctctgatacatggaagttataaaaagtctcactaatgaatgttcttaatatatatggggtaactaatttatgcatcagactttggaataaaagtaatagcaacagcaaatgagagtctaagaataattcatttttttgatacacttctgcccccaggtgccaaatgctacagggtggaggcggagggagacagaaaatctttctgtataggaacctactgatcgctgctactataaatttttctaaccattttatttccattgattattgttttagttcaggttttccttattcctcatttgggttattgcagattaactctctgaccaagcaatccatcgtttccatcatcctccagtccatagttatatttcatcccctttcagagagcattacagactctgtggtcggcccagcctacctcttcgatgtcatcacctccacctgctcccacaaatcttatgggtcagacacaccaggctgctcagtgtcctctcacagtgctgagtttatgactgggatggattgattttcatactattgttgattcaacattttttatagtatacttcttgagaacagagaccatgttcagggatccctagtgcttaatacaattcctaccaaatattatgcaagtaataaaattgcagtgtcattgaacattttcagatatgcatttatttctactaattaatcttagtagtattagcagccttgactaaatattatttctaaattgatcaacatgcgatgcaaagcatgctacagaattgaattaagaaaagaatttccatgagagatatgcatttacaattttgtagatttaatctttgcatagacttttttgttgcagatactgaaaaggaatccataaaaatacatagatccctttactagccacttttaatttacggatgaggaatattcagttcacagactggctagcgctttttagctttctttagcgtttgaagcagggcttctaagtcacatgaaagactagactagttattggcatttaaattttttggctcctacttgtatgtattatttattaaacaagtagttattgcactacctttatgtatgcagcactgttttagacaaaatagaattgtgacatattccttgctcatggtcttgtttcaaagacaatacctacaactgaaagaattaaataatagagccaggcaatatctgattgaggaaaagcatgcagtaaaagttcagagaagaagatacacgtgcagaactggaatggtcagtagttgcttcatgagatggttgcactgagctgaacccttaagtaaggatgtggatacatgagaaggaagaagctggaaattttaaacatgaggagcttcatggggaaagaatttcaagctatcaaaagatatcaaagattgaggaatttggacttggtctgggaggtattggggatcttgaagatttgggggtagggaagtgatatgacaaaagctgtgtttggaaggcacaagtgaaacagagttgggtttttttgtttgtttgtttgtttgtttttttcagacagggtctcactctgttgctcaggctggagtgcagtggtaccatcttggctcactgcaacctcaacctcccaggctggagtgatcctcccacctcagcctcccaattagctgggactataggcatacaacaccatgcctagctaatttttgtatttttttttaatagaggtggaatctcgctatgttggccagcctggtcttgaactcctgagctcaagccatcctcccacctcagcctcccaaagtgttgagattatgggcgtgagccactgtgcccagctaaaagagagattttgatagcttatatgatttgatgactgaataaaaaataaagaggatgaaaaaagtgaaaaatgaatttttggctgataaatagagaaatggaggtattaaaagaaattgggaagagagactctgtttcaggaggaagagggattagcttgatttttggatttgatgaagatgtgaagttaggtgaccagacctcgattcagattttagaatcagactctttgatttggtgtcattaacattgattgaagaatgttttgaaagctgaggtattaagaaacaacacaaaggtggagtttaaaagaggaagttgagcgtttggagagagtgccatgccaaaggaggggacttttaagaaaaggaagacaacacttagtacttctgtgtacccagccttgtaggaataactttacctgtgtaatcttattttattctcacagtaccatgtaaagtatgaattatcattgtccctatttgacaggtgaattaagtgaagtttattgtggttaaataacttgcctgaatgtcgtgctgctggtgcaaggttaatctggatttaaactgagatctgtctgtctaacccccaagcccacatatttttttaattgaaatgctgcaaaatggtaatgaaaggtcaagaagaataaaaaaaaaaagagtaaggccattagaatgttcaaggagaagatcattgtttaagattataaaagcgtagtggtaggaatatttcagcatttagaaggtaatagtaaattaatggaggaagtgaccctagaccattgctaatttgggcagcgagtaggacagttctcttctgaggcagctgagtcaagtacagcagagaagagtgctcatcagtggagaaggtgggaatagtgttggagaggtctcagaataaacattaagtaatcccagcactttgagaggctaaagcgtgtgaatcacctgaagtcaggagttcaagagcagcctggccaacatggtgaaatcccgtttccactaaaaatacaaaaattagccacgtgtgttggcactcacctgtaatccccgttacttgggaggctgaggcaggaaaatctcttgaacccaggaggtggaggttgtagtgaaccgagatcgtgccactgcactccaggctgggcaacagagcaagactctgtctcaaaagaaaaaaaaaagaatagacattaaaaagacacagacgatgtgagaaaaaagactgttcccaccaagtttagaagaaaggataatgaggttgatgtgcctgctgtgccggggggataagagaaaggtgtcaggcaagaatagatgtataaaagcactagttacaactatactttgaaagtcatattttacctggaagaaatctcaaaaaacaaagactacatggcagttaagtgacccaaatcaagtcactttccctcttcaggcctcagttttcccatatgttagacaggttaaattaggtgagacaaactgatcttttaggaccattctataatactgtgcttaactttctaagcattctggaatggagcagccttgatcttttcacagatacgtcaaccatatagctttatttataaaacgaacatgttgagataactaaaattagagttaatatcttcataggtacaaagaaacttttagaacttaagtccacaagtcagaatttctggatgaattcctttttcctcttattaaaaattgttaagatgtctgattagactagttgtaaattcccttgaaagcaaggatgatatcctgctctctactgtgtcctcagcatcaaggacagtgcctaacacagaacaactaccaatgaatatttatgaaatgaatgaaagtttgaattgcaaaattaaatgccaccaataaagaggctttgtgagcgagcgtggtggctcaagcctgtaattccagcactttgggaggctgaggcgggcggatcacttgagctcaggaggtcaagaccagcctggccaatatggtgagaccccgtctctactaaaaatacaaaacattgtctgggcgcagtggctcacacctgtaatcccaacactgggaggctgaggtgggcagatcgcctgaggtcaggagttcaagaccagcctggccaacatggtaaaaccccgtctctactaaagatacaaaaattagccaggtgtggtggcaggcacctataatcctagctacttgggaggctgaggcaggagaatcacttcaacccaagaggcggaggttgcagtgagccaagatcacgccgttgcactctagcctgggcgacaagagcgagactttgtctctaaataaataaataaataaaagtataaaaaacgagccagtgtcgtggtgtgcacctgtagtcccagatactcgggaggctgaggcaggagaatcgcttgaacccaggaggtggaggttgcagtgagccgagattgcaccactgcactccagcctgggggacagagcaagactctgtctcaaaaaaaaataaataaataaataaaggcttagtatagaactcttcccagtcttttttctccactttgattttttttttttttctcaatctcttccatgacaattcagggacacattaattgtgcaaaaggcagtcacttgtctgtattgtctatttttatatcacttaaattggtttttcatttggttgctatgttgacattttatgaaaagggaactaaacttgtgaattgactgacagtggaaatcataggattttcaaaaataagttttgtagttacttaaaaattagtattccagttttcggtcgttcattagtttaaatgttaccaataatattttctttataaaaagaaattatgttttatattgtagaggaaaaatgatttagaaaaacagaaatctatttctgaacaaatttagtgatgctgatgtaagaaaaagaaaaccacaagaagtcatcccaaatttagtaatgcttcctatcttaaacacatgatttcacttgtcttctggctagctaaaggttacaaaatgtcaccataataccttttacttccttatgagttcttgctactccaccccctacccccaaatatggtagatcgagttgtaaaaaccctgaagtatgacaatatagtttattgcacttatagttagaattattctgccaagatgagctgagaaatggaggaaatggatttaaatttacagcagtccagtgatacacaatatgcgttttccagaccactgaaacagcaagccaacttttaactttaatacttcatacagtggaaaagttacagctgtaataaaatcaacagatacatctctggttaatgttctcaaatgagaaaattgactgcaagaacatttgtccaaatacatgtttttatatattttatgctactttccagaatattaacagttttacatagcgctgttttggaagtcactcattgttttcatctttctgattaagaaatagggccaaagttgtacattgcactagtagtagacttttaaagatgtctttgtctctttttcagtactaagcttcaagttcatagattatccttgatctttcctttccctaggtagagatttagagtatttgtttatgtgagatatataaaaaaaaaaaggagattttaacaaatgactgtttgattcttgggtagaaactaatactgatcaagaccaaccaagtattcagacaagatcgggcgtgttcagggtggtacggccatagacgacaaccaagtattcaaacattgagtgttcagtggaggctgtacagatatcctgggttttgattcaagatagtgagatagccatcctatgagaatgtgaacttgaaataagattttgattacttttttttcctcctttaaaggtttgttcaattttaactattttttttcaaaatctgcattatcacagtatattttaaaagaatgactaatttactgtgatatatttgggagttaccttgaaagagattatcttgtaatttaaaataccagaggtagagtgaagagtcaggtggtaaaagagaaggagactggatgtttgtacccggtttgcttcttcccctttgttctgctgctggttttattttagctgttctgtttgcctcaccgcaggcagcgtcaccactccggttccaatcttctggacgtagagttttcaaaccatctataaattagcagtctaagtggaactttggcaaatgaggttgccaacaagcattttctttatatttagataatttgagctcatggcctctgggcatttggtaagaagtccagtaaagagaagcctaaagaacagaatctttattatgagtagtcgcctttttccactcagcagtttgattccaagcaccctgagaaaaactagagacatagtctagttggcaggttttttgaagagaatgagaagcccaaaccaaaagataatgaagaccacagcagagaactaccgaggcagctggcgcagatgcttttttggcactgttgagaaaggcttcagacccacagtctgaagagatggagaacccctcctccaggagcaaggaataagaatgacaattgttctgtaggacagttgacttagattcaggaaagttcttcagaaaatatattcagatcacaaaaaaggtgttaaaatcccaggatttttcagccaaggatggcacttgcttctttcagcatcactcatcaagttgaaatttatgagtgtcctttgttatcacaaacaaagcaagcaaactgaacaaatgagaatgcttctttagtatctacatagcactttaaaagctctgttttctttacaaaatgtgtgtatggaaaggtaaaatgggaataaatagtattaaattctgttcttagaacctactgtatagtgattgaacagctaaacagaacgaaaaagcatgcacatcttacagatacagagatcatgactttggtagatgagactaacatgtatgaaggtgtaggaagaatgtttatttttcagtccaaggaagcaattcacaatcaactgttagagaagcagcaaatagcgaagaaaaaattaaagaactagaacagaaaaagtcctacctggagcggagcgttaaggaagctgagaacaacatccgggagatgctgatggcacgaagggcccagtagggagcctctctgggaagctcttcctcctgcccctctcattcctggtgggggcagaggagtctctgcagggaaacagcttctcctctgccctgatggatgctttatttggatggcctggcaacgtcacattttctgcatcaccctgagccccatttgcttcccagccctggagtttttaccctggctttgcctgccacctctgcccaggacactcttccctcttggggtgtgtgatgaactcccaggagaggaaagatgggagccagggcaagataggaagctctgcctgagctttccactaggcacaccagccagaccaataaaaagcatctgtcccactctgctaagcctgcttttcttgagcagagggtgagagaggcagtggccatctccacctcagctcctgctccctctgcatcagagcccttcctttcttgggggatgggctcttgccctcttctcttttcccttcctgtatctttgactaacgcctcagctttcaggcctacatgtagcagacagaagaggaagaaagaacagacgttcacagctgaatctcagtgaacagaatagcagtccctggatggcagtctgcctaaagattcctttccctgccttctcccatacattccaaaaggaagttcaacagtcagcagcacctccaagactgtctccttttggccaatatcataagatggacgccgtaatcctgaggcctcctagaggctgagggggcaatggtgtgctccagctggctcatcccagcccaggtgggccaattattcaattttcaagaattttgttgcaagccagttgttaaacacagccattataattatgtaaatttgcaaattatgttaaaaacaaggacaataaatactcaaaatgcaaaaaaaaaaaaaaaaacctactgcatagtgtaatagtgctctcacttttctctccttgattctgatgtcaatcactcattgtcacctccactagagggggataaaaaggataataggaaatcagaatattttgatttgtagttcaactgttgatcaattatctttgagacttttaacattcatgactaaggaggattaataattaacatgagctgtagaattaaggtttgtatggcatgataagtataaaccagttttgggaccgctataattctaaaaaagcaggtagactagatgattagttgtacacttattactgctaattcttgattgtagaacaaattttcctatgaaaaccatgttgtgtattttatatctctattagttcgttaaaagtttagcagttttagatgtcgaaccagtaaaaaacaagttgcccattctatcatttttttttattgtggtaaaatatatttaagataaaatttacgattttaaccatcttaagtgtacattggtacagtggcattggttacgttcacaatgttgtacaactgtcatccctatctatttccaaagctttttcatcacccaaacagctctatacccactaaacaacaactccacatcacccactccccagccctggttatctctgttctactttctgtctctatgaattcggatattccagttgtttcatataagtggactcatataatatttgtcctttttgtatggcttatttcatttagcacagtgtcttcaaggtgcatccatgttgtagcatgtatcagaatgccattcctttttatggctgagtaatattcccttgcatggatatataccacattgtgtttctccattcatctactgatggatacttgggttgtttttgccttttgctattgcagataatgcttcagtaaacattggtgttcaagtatctgttttagtccccacttttagttcttttgggtatatacccaggagtgaaatgctgggtcacatggtaattctgttttgctttttaagcaactgccaaactgcttttcacagctgctataccattctgcattcccactgcaatatatatgggttctaatatctctacattgctacaacacctttttttaaaaaaaaaaaaaaaaaaaaagctgtcctattaggtgtcaagtgttatctcattgtggttttgatttgcattttcctaatggctgctgatgttaagcatcttttcatgtgcttattggtcatttgtatgggttctttggagaaatgtgtattcaagacttttgtccatttttaaattgggttgtttgccttttgcctttctattcttctctcacttttaaattgattttctcccatatttctccacaaagtcaaaaagatgatttcatttgaacacagataaatgctgtcagccttccattgccatatacattgaattaaggtcaaatgctttttgtgctgttgctaaaatcacttgagaatctgtctctcttcaactgaaagaattgttctggatgcgttgatgctgtggaattccttgtactctctcccaaatctcatttaacaagctcacatttagggtgtgattcactgtgaagtattccagaaaataaaatccattttctcagaatgatgagaaattttacaccttgaagagaccatctcttttccaaactgagatccacagattcttggagatccacaaatatattcttgggctctgagagttttagaattttaaaataatctgtttttatatcaataatctaaaaggtcattagaaagcccacatttcacaatacaaggacattttcctggaatgagactgttttcttacattagtaagatggaagtgacttgcctaagataacacagcaagttaaaaccaacactaaaactcatctttggaagcttttctcagtgttctttgttactagtgtggagatcttgcaatgattctgtcttcattaagtctacaggtagtggggaaagcagaaaaagaacaagtattaactaaaatgatgagtgctgtaagggagagaaatggcagtatgagttgtgtagaatgagagcagttgcataggatgagttaagttactgtgagagtttgaggaggtggtttttatgccgatagttgaagagtgaattggagttaccttaagggggttgtgagaagaaccatgttacagatggaggaaatgagatgtgaaggctgtgatgtgggaaacagcttagtttactccctgatttaaatggagaaaaggaatccagtgaggcttcagagagaagcaagaactaggttattcagggtttaagacaatcaaaagtcaaaatagagtttaaacaggggagtgacataacctgatttgcatcatgctggctgtagtatgcagaattgattggagaggcaaggatggcagacaggacgccaggtgggaagctatggaaaggtgcatatggaagaagagagtgtctttggattccagttggtaagtggaagagactgaagcatgtggctgaatgtaaatgtttaataagtagaattaaaaggacatggcgattggtttgatggggatgtctgggccttcaattatgactccctgtttttggcaatgatcagctgggagattggtggcagcatttactaagacagggctcattgaaggaggaccagttttagggaatagaggatgaatggagtttttaacctgttgagtttcagttgcctgtgagatatttcaatggagttaccaaatagatatttctatgtagtgtcaaggttcagactagaggactgaggcagagatataaatttggtcttaatatatccatagtgcttgaaactatatgtgtggagatagttatatactaatggttgtcaaattaagcattttttccaattcctttcccagaatctagtcatgtgaaatgatgaggaactggaatgtacagtgtatacattgttcttggcaaaactaaatttaaatttctgcttaacctaatcaaccaaaaagccctttttatttctgcctgtgtaaaatctttcttcaacatattaagccatttttctgtcttggtaaatatgatagggtgaaataaaatttaaattgaatttagatagccctgaattgatgattcaagaacttttagaatcttagttttatttttgagtagcaaataacattatactgtagatataaaaaatgttgaagattatcccaggaagtgctctggaagctgcttttaaaaataaataacttttaaactgccttttctcccttagcatttgcccatttgttctaaaggtagaagaacaactttcagtgtgttaagggtttttaatagttaatcacagttatatggcatttgtttttgtttaatatgtggatttttatgtaatgccacccagaggcctaggtatatcagtacattcctcagcattattaatgtcatccaaatagattgtctttgattactgatcactgactccatatatagggcagtgatttcaaaattattctactaccattgcaagtagacatgtatacagtaaagaaccatccaaaggccaggagcagtgactcaggcctatagtcccagcactttgggagaccaaggtgggaggatcgtttgagcccaggagttcaagactagcctgggaaacatagtgagaccccatctctacaaaaaattttaaaaattggctgggcatggtgggatgcatacttgtagtcccagctacttgggaggctgagggaggatcgcttgagcccgggaggtccaggctccagtgagccatgttcacaccactgcactccaacctaggcaacagagtgagatcctgtctctaaaaataaaaattctgaaaagttacatctaaattaggtttgagtaaatgaagtcatgagccaactgcataggtgatctttctagtggtagcaataccaaagtgggccttgtaaaaacaaacaaacaaacaaacaaaaacacccttttaaatgtagttcagggagaaggaagctagtatttcaacttactgtatgccaagcacttctaagtgctttacattattctctttaatattatttcttatattcatcaccacaatcctcatttacaactgaggaaacagaaggaggttaaatagctttgcccaaagttacaccactggcatgtggtaatgtagggcttccagcttgagtatatctaattttatagccatcattctttctctttccatctctgtatctctctgggagtcaggagacctatattcctgtgtttttgttgttgtcgttttgagacagagtctcactctgttgctcaggctggagtgcagtggtgccatcgtggctcactgcaacctcaacctaccgggctcgagtgatcctcagctgtgccatctcgctatggaaccttggctaagccacgttctgagctatggtaaagcacagtaataggttcacattcactctcccccatcatgcttatgccccctacctcgtctagaaggctccacacttcctttctgtgtgctcgttcattcagtcgtcagtcatttcgtcagttagtcagacaacagactttgttcatacgacattagtgactgaggttctgttgagtgacgcagataggaaataacctagctgcatggttgctgtctttcaaaaggccgtactcttaggatccacatacaggcccccatcttctgtgaagccattgtccccagccatcccattttgacgagtttttttgagtccctgtgaaactttggcttttttacatttatctggcagttaactaggtgctgctttgtgacagttcttctattattggatgcaattcttaattcaaatcatgtatcattacttaacttttcacctctttgcagcttctttctcccagaagattacaagttccttaagagcaggcttatacttctttgtataatatttcccacagtgtctcttaaatagcaaagttttttgacctgatttactaaaaaaaagtttgttgacttggcttaaattttattttcttttctttttttctttttttttttctttgagacagagtcttgctctgtgaccctggctggagtgcagtggtacgattttggctcactgcaacctctgcctcccgggttcaaacaattctcgtgcctcagtctcccaagtagccaggattacaggtgcccaccaccatgcccaaccaatttttatatttttagtagagatgggttttcgccatgttgtccaggctggtctcgaactcctgacctcaagtggtccaccctcctcggcctcccaaagtgttgggattacaggtgtggaagccaccgtgcctggctgacttgggttaaatttttaagtttagagtttactccctggttgaatgatttgggccaagttacatagcttctgtgaacctcctcagttttcaacaaaatgggaataattcctacttctcaagatgaaatatataatatatgcaaaagtgctctgtgaactctaaaagactatacaaatattactgattattttatactttttagtcaaagcccccctgtcctgcattgttccagtagacactttatgtaccaacatgtacttcagctgttcacattatatacttttatctctgttatcctaccatctaggtcaatacattttaacatctttatttgctgtaagtttatttctaattttttattctttattttgtttattcccatacttaacttttacttacgactacggatttaagtagcatgaactgtcttcagactggcctcctgtgatgagtcacaaggcccatcataatggatccagattgcaaaattgggagtaatagaaattactgttaattttcttgtaaggtagtttaatgcatttacttgcagtttcagatgggtagaaatggtacgttgttaggaattcactattgagatgatttttagtctgtattagagctctgaatactctgcaaataatatgtgagcactggtaccatcaaagcatgtgttgccttaggtggtgtttacagaccttgtcagagttggtagtaattccagaatataatcatttcaatagctaaggcttatggttaagacttccaaagtgttcagaatttactaaattgaattatttgaggttttgttactgtgttacttgtagtcatcaaatcaagctttattttactgccttcattgaaataagcagttttgaccatttaaaaatatttttaataggatacttattttctctagcatttttagagtgtggttcctgtgtggtgaatgtctgtcacctcttggaagccttgaaatacacaaattgactattgttgtttatgttgaaagatattaaaatgagatttgtaattgaaacgggcattacttatttcacatctggttgcttgaaaagtggccagatgcaacaattcttaatgcaagagagcctacggcaaaaactttgcaattctcaccctctacaaaacagctgccctgtgtgaaccttcagtggaaaaagaagaagaaaagcaaagcaaagaaaattcaccccaccacgttctaattacagatttccaataaaagtattaatatgattcctacatcaatgagctaatcattagaagtagaaggcaatgtggggaaaaaaaaaaaaaacaagaatggcagcactgacctagtttctagttgccaggaccaaagacgtcgtgacaccactgtcctttctaaatctccttaccttgcttaatcttaaagtgatggtatgtcctggtttgcctgacagtcctggtttatgcctgttgtcctagtgtgattttttgatagtgccctctttcactcttaaaagtgtcccagtttgggtaaggaggtatatgcccatcttaatttaatctctttatctcagagacattaattaggaagggtaagaagtgggagttatgagaatgtatcaaagggaaaatgatactccagttgagacagtgctggaaccaaaatgctgctgatctgaattctccgtaataagatgagaattggtttgcgaacacattctaaacatcacaagatacatcagattaatgctggttgctcttggggagttgtggggaggaggataaccaggtcaggagtttgtggtatcttttatgcaacactaacgttaagcttcctgtctgaggttttccatgttgtgagttttcacctcttgatactctttgaggactagtgatgctgacatctactagaaacacttcagagaaaaaaaaagatggaagataatagttctttagaaaaatggaaacatttacattattcttgataactttgttcttctttgaaaaagattagctgaacatccctgctgattaccttaataatctactctgaaattaattttatctactctagaaggtttgctgtggatagattctcctttagagtcctccagatttgatagctattattttttaataatagttaagtgcctttattttgtttaaagtactgaaaactgaatcaggtctcaggaactagttatgagcaactgattatttagctgggaaaagaaggtaaggaagaagaatatttgaacaaaggcctttaggtttttataaagacattatgcaaagagtgataaccatctttcttacaacctcttctcaaagtaaagcaagggggctgagcttcttgtggacatttaagtttgaatagggtactctcctgaaggcctttaaaaatacagtagcttgtctgtttggagtttagcaatcaatcaatcaagtcttgaacacctaatgctgcgctaagaattataaatgaactagaaggcatactcttttcatgtcttcaaatgacttaataatatacttggggaaataaaacaaatatacgtgaaacagatcaggtctaaattatgtggtattgactctatgagttactaggatgaattggcattcaaagagcatttaatttgtgccaaccaatagaaatatctcattgtgttacagcataagaaagatcaggaagccagaaacaagtcttagtggatggcagaaaataagaatatatacattcatttctacactaatgcatctattcagtatttcttgaggacttactgtatactataggcacataggagtgagtaggtacattgttctgagtagaacttatgtgttaggaaatagggaacaaaaaagtgggaggacaggtgggtgtgtgggcagagtatagcaataatattgttaacctatgcaaaggttaggctgattctgaatagagcaagagtttataatggaagattccttttaacacttaaaattcatgaaacgaagagctcaaagaaaatcttagaagccatctaatctactctcctttccctatctccacttgaaaaatggggacttaagagcagagctgttgcgacttgcctgaattcataaaccgagttagtggcggagctgaaagtcgagcctggctcttctgtttttaccatttgcagttgctcccacccctgcccccattcatgggttccacatccatggattcaaccaactatggatcaaaagtattttttaaaaataaataaaaatagcaatacaataattaaaaatagaaaatgtaaaatacggtataaacaactatttacatagcattacattgtattagttattatacataatctagagatgatttaaagtatatgggagaatgtgcataggttatgttcaaatactatgctattttagattagggacttgagcatcttggatttttgtatccacaacgtcctggaaccaatccttcatgaataaggaaggacaaataaatatatccttctgcctcttcagtcttaaagttagctaaaacatttcacttccccatgccaactctgtgaataccagatcttagatcctaaactaaaggtttggaaggcaatcattattcaggcataggtaggaaagtatgacttagaaaatgaatctgtttcgtgtctcaattttaataaaagtcttgtttataaaatgatgaaaggctcaatgagattaacaacatacaacttgtaataaatgttttgtaaccatgacactgatgagctgtgttttagacctagctgtcactaattggctgtgtgatttttgcacaaattatgtctcctcttttgtctttatttatattatgacagaatttaaattgtttcagttattttattactatatagatatctctctcttaaaattgcttgagtacagcacagacttcaaggaaaaaatttcttatgattctcagtgttcacataatttgtattaaatgtaacttaaatatgtgtaaaacaagttgtaaactatgtttatagctcttatatatttacacaaccaaaataaattttaaaataagttgtaaagcccttaacattaaaggtacaaatatggaaattactgctatagcatatacttttggggattcaacaccttttgctgcttaatgccatatctgattaaatttttccaagacttttttctttttcaactcttctgtgaaacattcctttctacagtattactggatctagtttgaacttcagttaactcagatgaatcatttacatattaaaagtttacctttgttcttctttcactaaccttagacaactaaagttgtgatattgggcaccagtgaaatcacaggtagaaactgtggcactgaaactgcttgtctgtattcagttataaaatcatacatataatctaaaatatgaattcttatacattttatgtcattaaaattaaggtaaaattgaaaacagagttaaaaacttttcctcagaaatcggaaacaatctaaatgtccatcagctgaatggatagacaaaatgtgctgtatcaatacacagcctaatctaggcagttcagcagtaaacaggcatgaactgctgacacatgccacaacctgaacctccagactcaacctcggaacctccaaaacattatgctaagtgaaaaaaaaccaaacacatgagaccatatatcatatgattccatttatctgaaatgtctaataaaagaagcaaatctatagaggcagaaaagtataatagattaacagttgtctgggattgggggtagtaattggcgtttgattgtaaatcagcatgacagatcttactaggtgatgaaaatgttctaaaactgatttatggtgatggttgcaaagcttggtaaatttactaaaattcgttgaattgcacattcaaaatggtgaactttatgctatgtaaaatatgcatcaataacgctgttttaaaagctttttatgaagacttctagatctcctaagaatatttaggtatcagatattttcgcccttgacccttccaaggtcagaagacacagctgaaaaaatacttttagtggaaccaaagaatggatccagtaactacagtatcgtggattctagctttgactttgtcactgactgtacttgggcaaggcctgggcaagtcacttaacctctttttgctttggtttccccatctgtaaagagggtgttagtttaaatgttctccaggatttcttgcacacatgagagtcgcatcctcacatttctgttatctgtgaatctctacctcctaatgattccccctccctcaaatactctaacaaagcccctttattcagcatggcatatgtggcatattgcttgtctgactaattcttgctcacgcaagcttcctgaccttactgcataggtctttcaggtacacagttctcaaagtgttgatctgaaagttccgtacaagactggctccccatcactcattaatctcccagaggctaccttctcatcctatgtaactctcttatggaagctctcccatagataacaatatacttccccttcaggcagtacatggaagaaacaatgggctatacaatggaaccatcctatgagattacacagaatgagaacctggcccattgttttctcctgctgcctaaggaaggagttgtgctctttggatccctgtacagattttggcttgtccacctccctgaattcccaagtaacaattaagcaatctgcctccttccgtcttctcatttcaatgtgtaggatatttgtcaacttgcccagagttgctgtaggcattttgagctattcatctgactgtgtgcaatagataacaaaaatataattaggaggaggactgaattaagtctgaattttatttttatttttattgcgggggagaggtgcttactttagagtggtaaaagttacttcttgtccaagttttcatcatcccctccttccctctgtgtttcaataaaatgtttccaaagtttcaaataaaaagtttattaaaatagaggccgtgtttttaaaaataaaaatgtaacatcttacttcctagaggtatctgaagaaaagcactccaggagtataaagaataaactagatggttggaatgtggtttattagtccacaaacctgtcaggaatcttggactcttttcctaaagctatgcagacatacaacataactttggaagaaccagttaagtttgtattctaactatgccctgtaatttaggaataactacctgctaaacactgaaaatctgttggtggaaatcatcgggtaaaaccaaagcataagttatattattaggggttggtaagtggttttgtatatgcaataaaaaggattagatggctgggcgtggtggctcacacctataatcccagcactttgggaggccaaggcgggcggatcacaaggtcaggagttcaagaccagtctggccaatatggtgaaacctagtgtctactaaaaatgcaaaaattagccaggcatggtggcacatgcctgtagtcccagctacttgggaggctgaggcagaagaatcgcttgaacctgggaggtggaggttgcagtgagctgagatcacgccactgcactccagcctgggcaacagagcgagactccgtctcaaaaaaaaaaaaaagattagatatttgaagaaccatgggatgggtgtcccgttaactgtccatagggccaaggaaaatggagaaagatgaatttgaaataaaattctctaaaaatagctgaaaaagaaaaacttagatatgtaagtgttttatgatgtgaacattcaatgaacagaggaaagagatgtgcctaggaatgtttggtgttgaagatatttacctttttaataaaagagaacaaattaaacaagcagtcttcctttcttgtaggaactgtatttcagggtaattacatggctttagttgctgaaggaaagatcttccttatagaaaaatgcctgctgtctgggtacagtggctcatgcctgtaatcccagaactttgggaggccaaggtggacagatcacttgatcccagaaattcaacaccagccttggcaacatggtgaaaccccatctctacaaaaacatacaaaagttagttgggcattgtggcacgcgcctgtggtctcagctactcaggaggctgaggtaggaggatcgcttgagcctgggagtcagaggttgcggtgagctatgatcgcgctgctgcactccagcctgggtaacagagcaagaccctgtctcaaaaaaagaaaaaaaatttcctactaataaatgtggaaagagtggtggaattagaaaaacatttcataaactccaagtattgattcaggaaaagatgataaagtttgttacacctttaggtgaatgattaatgaaactgaacatccttgtaataccaaagtaacattgcactgatgactgtctaattgaaggagaaaaagtaactgtacaatggagagatgagacatatcaccattctaacttagtggtagattttaccatggctgatggtcagtcatatattttgccttctgatgtgatggaataggaagtacacatcccctatggtatattcaagcctaaaatgtttaacttgaatccagaaatccttggatatagtgtccagtttataagaaacacaggggatggagaatcaagctaaatgatacaacaagaaaacaaccagacaaattcagaggttgagacattctatctgataactggcctgacctcttcaattagtcagtggccttaaaattaaggggaaggagtagtcatgctagatttaaaacagcttaggaacatacagccaaatgcatttcatcatactggattagattagggttggagcaaaccaactataaagaacatttggggtcagctggggaaatgtgactatgggctgggtattgtttgaaatgaaaatgtaattaaatgaaaagatggagattattgacttgaaaaagcagaggactaccaggaagtaccatatctcattttgattaaaaaatacacatgctgtatgtatgtgtatatgtgtatgtgcttatgtatctgtatatacatatgatcatacatatgcccagaaaaagacccagatgcataaactttaagagttcaacattggttatatctggtagtggaagtataatcattttgtttttaccagtctgtattttctaatttttaacaatgaacgcggattggttctataataatgaaaggtggttttttttttttaaacaaaaaaacccctaccttttcagatagaaaagcagcagtgtattctttccttcaaggaaaatgaaaatgtttccttggaggaaagaagatataaagactagaaaacactctagtatctttaaaaaccaccaagctttcaaatacaaagatttaacatatgtaaactgtattgtacttcatttgaaattcagtatctttactaaagagatttcttttatcctatcctacacacgtacagtattatttaatgatgtgcacacagaactctgccagcctgaaacagtaggtctaagacacgtttgttgtttttggctcccctgtgttgatctaaatcactgcctagtagcccttggaaatttctatcccaaaacgtcccacaggtgcccaataccatggattctcattccccaagttcattctcactcttctctcttggttgagtcttgcctttcttcactctgttccctttccttgttcctgccatccaaagcttctctgtctttcaggctcatctcagatttcctctctttcctgaaggctttttggattccttccatctccatgcacagtcagaagggctctgttcatctctgaatatctttcgcactccattgcatctggtttaaatcccttctctgcctcttattagctatgtgatctcaaaactcaatttctttatctgtaaaatggtgataataaatgacttcgcagggttgagggcctcaagtcagtggcgagtactgcagtagaggcagaatacatagctcaacagaaattactctagtaatggtcatgattgtttgcacttctctcaaaccacctactcgtatattagagtgcattgtgcttgtcttatcctctttactaaaagtaggaaaatggcttgagaattgatgctcagtcttatttatattattctatccctagttatgtgatacttaactgtattgctcggtatttagcagcccattatctaatcataacatcaccctcattctttctgagcttgtttcctttttgtgaaatggggctaccattcaatctcaccgaatttttttttttttttttgagacagaatcttgctctatcacccaggctggagtgcagtggggcaaactcggctcactacaacctctgcctcccaagttcaagtacttatcgtgcctcagcctcctgagtacctgggaatacaagcatgtgccatcacacccagctcatttttgtatttttggtagagacagggtttcgccatgttggccaggctggtctcaaactcctgacctcaggtgatccacccacctcggcttcccaaagtcctgggattacaggtgtgagccaccacgcccagccaatctcacagaatttttataaagtctagacaaatttttattttaaaagacttagcacagcccctgacagcgtaggcactcaataaatgtggaatctgaatcttacttaaagctagtttatattttcaagtcttcttacttttactaatgctgctttaagatatattctataagttcaaatgtaaagttctagattgggaaagaatttataatgtgtctaataaagattgttagagacaaacttttagactgaaccatctactattaatggactgatgaatcttaccggaaaataaacataaaatatactctgtgttgcctgtggtttaattgccatcaaaattaagtttattatgtactgatttcacagttacattttattttcagtcaaatatctatttgttggtgtgaagaaaatatgtctacttccgctaagtgaactttaaaaatttgtacttgcttttgaagattccatactctatataccgtctcttcctgaagcgtatttatgtagctcctgttaacataagagcgataagagtgttgcttgatgactgctcttattgctttattaaagtgtcatgtaagatttaaatatttgattataagaattcataatataattttgaaagcctactctgttccagacgctgatttatttaaatcatctctaattctcacaactccgaaaagataagaaaacagagatgtgacaaggcttgaatgcaaacccaggtctgtttgactctttgttcattttgaataaagacaaattactcaaagctttactgccaaaaactattatctggttccacattgaaaccctattcaatagttgttattattttcttcttttgctttgaataacctcccagcattgttgtgagtttcaaacgaaataaaaacactatacagatccaaggtgtttttttttagagtattgttacctcaaagtagaaattttcaaatagtaatgttatcattttcttaagagcaaggaactttgtcaatagaaacaaaaacatcataccagaagaaccccagaatgctgggatgactcatgaagaatctgtgaatgaggcaagagaacattcgtcagcaaaatgactccgtgaactgatgttcaaatattatcaaattttaattaccgagtcataattgagtacttactttgtagagagcaccatatctaaaccctgtggtgaatgatgacattttcataggtaattcctccacattaagtgattcatcatagaaaaatgctttcatgctgatgacttccaccatgactgttggcattaaggatcattgacctgaagaactgatttgaacgtcttactgcatcattttaatgagatagagcatcgtttggagctttggactgggaatcaagaaacctggtttctagctcaaactctgctgctaatttatctaggtcatgctttgggcaaatcatttcattcctctggaacccattttccttatatcaaaaattaagagttggaatatgctaatctccctcctattaagtttcgtgagcccgtgatttcaacagtacgtaaatttcctttagtacagtcacagaactggtaagtgacaccagctgaaactgagtgcagctccgcggctctacgcttgctgtagaacctttgtgaattcccactgtgcttcaccagtgacaggatgtgctacccaataaatctccatataactgatcttgaaaaattcattgataaaatctgaaaactgaaaaagatacatgttttagaggtttaggtttcccacaacatgaaaatgtgtcagttgataatatagttcatggtattttactatgctagaaaacagcttactagagaatttcagatattacatgcaacgacaagttaacatagtttaggtgggacgtctttggttcaaagttacagtaatttcaaaagtgtttagttgatccctagaaagtggttaaacaggttagtctctttttcaggtattagagggaagttaacttttgaagctgggcagaaaaggaagttttcagttggttttttccttttgagacttttaatttatcatcagacactattttttcagatgaaagtgccttttatactgtcacctaggtatgagtcaagtatgaaaaggaaatagtaactcaggatcagaacatgaataagtatgcaatatggagaatttccattaaattttaaataaatgaattacagtcatattattcagtatctcaacattaaaactcaaaaagaccttaaggattattctgttttgtggaaagggctttttctgattctagagatgagaaatgtggacccaaagagttgacacagtaggtttgtggctgagccaagacaaaaacgtaaaacctaggctttctggctccaatgtcagtgttcttttctactgcttctgagttaagaagacctttttttttttgataccaaagatacatttactggagttattggcttctttttttttaagacagggtctcactctgtcacccaggctagagtgcagtgatgcgattacagctcactgcagcctcggtctcctgggctcaagcatccctcctgcctcagcctctcaagtagctgacactacaggtacatgccaccatgcctggccaattattttatttttttatagaggcagggtctcactctgttgcccaggctggtctccaactcctgggctcaagggatcctcttgccttagccacccaaagtgctgggattgcaggtgtgagccattgcacctagcagcattattttcctttaaatcaaaataatataattgtttaatataattatgtccataaaatatattacttttgaaaatctgaacaaaattacagtttttggttaaagaagaatggatttgcctttcaaaaaaatgatacacgagagactgaggcaggagaatttcttgaatctgggaggtggaggtaggttgcaatgagcctagattgtgccactgcactccagcctgagggacagagtgagaccctgtctcaaaaaaaaaaagacacagctgagtgtggtggcgagcaactgaaatcctagctgctctggaggctgaggcaggggggtcacttgagcccaggagttggagactagcctgggcaacatagcaagaccccggtcaaaaatttttttaatttaaaaaattttccaaaaggggcacagatacattgaacattgaccttcctttgtctgcttttatgggactatccggcttgttgtgatggttgtggtgaaatttacatccaggatacaggattatttgttcttctcaaaggagtgtcccattggcccagcatttctctcatgttgtctctcccctgggactatgaagaaaccctgaactgatgcaaccaccacttgaaaataaagttccaagccaatctgaattgcactaggaaaaggcagccattcttttgggtagggggagaagtgagcttggctggtcattctggttgttagcaattatctggcttccgtgggagcatcatccagaaatttacatcttattgaaacaagaagaaaatggatgctattatcagttcgttaggtctctaaactccttcttgaatgatacatgtgatatggatgtgctgttctttcattactctcatcatcaacaaaaacaatatgtgtgttttaatgccaaccagggactctgctaggttctagggatgcaatgagatctaaatgcttaaccttttagaagctagcataaatgttagtagcacttacagcattaaatgaagcagatttttaaatgaggttatagcaaaagaaaaaaatactgtacatacaattttataccaatactaacatagcttatttcacacaaaagaaaaagctatttaagcaattttaaaaattcatattcattctagagaataaattccaaatttatagcaaaaaaagagtgaagttttcattagctttcaagaataatgcaggctccaaagtatttaatattctatattatgggaatattttatgtaagtcatcccaacaccaagtaatgctaaaaataactttatataggttcaataccatgattttattaactatagatttttagaccttttcttactttttgttattgaatcattcacagcttttattggttgaattgccttctcctaaaagtaccaaagtgtgaagagtttttatggctgagtaatattcagattcttgtagccaaagacaggttctgtgaagtaatattgaagactaaatgttgaagagtagctttctctaataccaagcggtcaattttttcaaatatcatgaactggggtagagttaagttttcatcctcctcattatagaatcattcctcattatccccattctttctcctgctgaggatgtggtggtgtactcaaagtcacatccatacccttctgtctccaaagtcctaggagagatggccctcttctcaacctctacattgcacagaaccttacatccctcaacagaaggagtacatagtgcataaggaaagtggtcttttaccactcctcctcactctgtaacattaccaaggactatcctgcaaggggaccatccataggatgaatagcaatagactgctgcattgacgtgcaaagtgctgacaacccattggtgtacaaagcaccctaagcaagatctaaagttctaagatcttatcatgtaaatcaccagcatgctgttttatgtatcttattgtaatatccttccaatcagtattataaagggcaggacactgggggaatcttaaggctttgaagatagggatagtcacgtgcatgtcttataaattctctgatgatcatatactgtttactggtagtaatgactgtacttaaacaaatatattgtttctcatatcattgcatgccaattgaccttcaagtttaagccaatgaaaagatcactcttttaagtatatttggataattttgatatagttacatgtgaactcattaagtatagaaaccttggcttattatttaccacctaagcctaggtcagtacctggtgcttagtaggtatttgatgaatgatgggatgaataaatgtggaaataagtcttttcagtatctaaagacaaaacagatacataataagatacaaatgagattggctcatctatctttattttcattcatttgaatgtccatgtaagcaagttatttcttaagtgacccagcactgcagtgcaactatcattaacataaaatatgattaaataatccacattgtataactgttttgttagtaatgtagggatgctttgcgtgttgcttggtttgtgtatgctgccaaaagtgtaagcaacatttactgagctgctatgtggcaggccctgtgtttattaaaattgtagtttttgctaattgactgttttttgacacatccgtcttgttcatcattgtctacctagcacctagctttaggcttgccacatattatattggcaatgaatatttgttgaacaaacaaatgcatgaaatgtaatgagtaagacaggttttcgctttcaagtaaaacatagtctgggggaagacggaatgtcagaatgtggtgggtgctataggagtaggtgttatcagattctgatgctatggaataataaattgttaaaatatgtaatcttatgtttcagaagctaaagcacagtatgggaactattagaggcttagaaggcctcactacccactagactcagaagttgaatagtgtctgagaaaaaagagaatagaagtaacagtagatgaagagtccagaagtgagaccctttgaggacatgaggacaggtggaaggactgcatctgtgtgttgccaaagagtaacagagactggtataggacttgagttcaattcagtcatatccttaagtattgtgccatcgtgtctggattactttgtagtataagtaaatttccaagcatggggaggaaaggagaagctcctttattgagaattcaactgaatatagagaaaactaattttacacaactgtaatcactgtagtcatttggacaaattagcaaacccaagttttgctttaacttggattgccttaataaagatgttttggggcttaatggcacagttgctcaactcccccactttattccgtgatgttcagacccagccagcatttccccatcaggctcttgcaccatgattgacagggacacttttactagtccccttgaagaatgaatagttactcaatggagattaaccagatatatatttattttactcagaatatcacgataagtataattcagagaattattgccttctaatatactgccctgtgtgggggcgtctttgaaagtccgcaaagtcactgcaattctaataggccactcatgtgacaagacctgctcccacatcggtaatttggcacagctagtatttctccttgccaaaaagggcaaaggccttgagcaagaagccagctttttcctgattacaaaactgaccacaattcctcgccaacctaacagcgtaagtctatttttttctggtggtgtgttattcttctcatagagaactccattttttcattatgacatagcacttatcgtttaaacatcaattgatgttcaaacatcagctggtgtaacattgctgcagttgctattgatggataagctgaagtttttaagaaagcaaacccgatgtataaaattgaaaccatatcaaacccttcttcattctctcagctatttaattttacagaatttagatagcagtcagtatcattttgggcttcacaaatcagtagagtaagtaccttaggaatataacatttcagtagcatgctgataccaacgtttaaactatggatacatatttgaattccaaatttttcttcaaataatgtgattagagattcaaccaggaatagacaccgaaagaaaactttgcccaaataagctttctggtatttcataagcaagagatttaagttttccatttaagaagcaattgtgaattttacaacaataaaaaatgcaagtggatattgaacagtctctgctctgataattctaaatacagtacagttcacgcccctcacaagacactgaacatgtgggtcaccggcgagacagtgtggcaatattttccctgtaatgtaccaagtcttgccaaagcagtgaacattatgacacaactttttgtcacagctggctcctaataggacagtgccagccaattcaagcccagtcctttctgtgtttattcccatctctcccaaatatttggaaactgatgtcttgactcatgggtgtattcacaaattctgttacttcaagtctttttcttttaacggattgatcttttgctagatagagacaaaatatcagtgtgaattacagcaaacccctattccatgctgttatgggtgaaactctgggagattctcctattgacccagaaagcgattccttcactgatacactgtctgcaaacatatcacaaggtaaagttccttccagatacggctattggggacgtgggggcatttatgtaagggtaaaattgctcttgtagtttgtcttccaggttgtgtttgttttaatactatcatgtgtacactccagtattttaatgcttagctcgttgctatcgcgttcatttaaaaacatgttcagaaccttaaaaaaggaaacctaacctaatctattttatctctgtgcatggctcccatttcctgaattttaagcattaaaggtatagttatatccaaaaacaatcctgttcatttttatttcctgagtttgcatagatttcccaagaatacataagggctttttagacttgaagggtcactttttcctcttttcatctcatatgttagagatctctcataactgtttttatccctcttgcagcacttttattcctcttgaagtactctcagctcttttctgttctattttgaaatctaggtattgtgtgtgcacttcagctctcccaaagaattgtaaattcccagagtgtaggaccaagtggtgctctttattagatttcttaggatacttcctagcatagtgcctaatgcattgcagaatagattgtcggaaccttgaaaaatatctgttccaagcatcacattttatgcataaagaaaatgaggtccctaaaacagtaaatgcctattgcaagtgactacctattaacttctcttcagatgtgtcagaatcagatacctccttttcaatatttctttcttggccattgcaaaatataagttctccatttctatagctccttctactggagtttcttagcacagccttttctgttttgtattgtctcgtattgatgtctatatttctattcattttatttttctcttctcagattctgtgtaaaaatagattgttagctagtgtgattcatgttttataatataagtgctaaagcattaaaattaagtcacttaattgctgaaatggatggctttacattttaaccttttaattttcctggaagcctgaagtttgaacatattagtcaccgtttttaaaatataaagctttttaaaaatgagtaagaaaatgtttcctgaagtactgttttattttattacagtaatttgattcaacatgtatttctatcatctaagcctcttaactaggagttttgttttattccataaattgttgttattctgtttttctgcaagccataaaaattgttgctatctttcttcagttattaatttagcctgcctcagggcagaatgtcctggctatactgtgaaatagttcttgagtcaaaatttgatagttttgtctattttgaaagaacatgtctagaatgcagtgcaacaaatatcaacaaataggttaactgagaggcaagtactgtttgtggtaagggatggttatgtgattcaagttagttttcattctgtgctaatctctaattttatgctttgaatttactctgagtttaatttttttgagtctcaatttcctctaaaagaatgatccagtacttttcttcctaattaacatagtgcagaatgaaattattagcaattaaaacattatattttgtaccaataatttaacccttgtcttatagggtctctggctactacttcttcataagcactgtttctctgttaaaaatgtgagctcctaaaggcccaagacctatgattgttactcctattgcattttgtaaatgacctttaaataattactccacctcttccaaaacagacagacttaaaaataaattagctatatgatcatcattagccgaggccagcagagttgaacactgtggagttgaggtatttggcatgggtacagtagtcctcttaggtgctccttcttcctcatcataggcaaagtgaaattgggggtgttgcaaatggttgggtactgctatttaagaaaaagtggcacatttagtgtgaatgactcagatatccaggtagattggtcatattcatgagattaaaaatctcgactacacttagccactatgcccaaagaggacttccatactttttccaaggctccatcattgctgtgacccctttatattattcccctttctctttttatcaagagctcctcaagcaaccccaagtaacctcatgctggctctgaaaccatttccactagtaaaaattggcaagattgaagggaagcttccacaagctcaagctgaatatgcctcctgcttttagtgccagacttagtcctgtgtgaattctacaattttaagtcgttgcaccagagccttgaaagatgatgacacacttgtcctttggagctgattgagcaatggaaatatgccttagagacatgataaatgctgcaatagacaatccttcaaaacgagtctctcctgagataggagtgagtgattgattgcatgccatttttattgagggatacttaatctgtggttacatatctccaggcaactgtatattcagaaacatttagataactgaccaaagttttcacctttccagaagtttaaagggacccatgtagtaccagggaatataaggaccagtcctttgttggccacatatttgctgtgtgaatttaagcacgccatttttcttctctggccttctgtttccacatatattaacagaatacacaggattaatgggaggattaaatgacacaatacttgtgcaagtagatctaaagccctatatggaatttattgctttagccttgtagcgttaatcacttgtggctagaatagaaggctccgtttaaaaaaagaaaaggctgggtacagtggctcacatctgtaatcccacaactttgggaggccgaggcgggcagatcacgaggtcaggaggtcaagaggtcaagaccatcctggctaacacgatgaaaccctgtctctactaaaaatacaaaaaattagccaggcgtggtggtgggcgcctgtagtcccagctactcaggaggctgaggtaggagaatggcgtgaacccaggaggcagaggttgcagtgaggctgagattgcgccactgcactccagcctgggcgacagagcgagactccatctcaaaaaaaaaaaaaaaaaagaaaagaaacctacattttaaacactttatggatatggaaaaacaaaaaccgcagaactctttattgcacaagagtaagtggcagttatatgaatgaagcggggcatccgcatgatctcctgtgagtgttttgagaagatgatcaaacttagagaaagcatctttgtgtctaatttttttaaatgatgaaattatttcccactttcattaatattttcctgtgaagaaattgaagttattctttgggcctaaataaaagtgacaattacatgttttcttctcagaggcattgagaaacttggattataatgtttttcgtacactgaagtagaagtccagaaaagatttgagttattgacacagatcttcttttttttttgagacagagcctcactctgtcacccaggctagagtgcagaggcctgatatcatatttcaccacagcctcaacctccctgggcttcggtgatcctcccacctcagcctcactagtagctgggactacaggcgtaccttaccacacccagcaaatttttgtaatttttatagagacaggatttcaccatgttgtccaagctggtcttgaactcctgggctcaaggaattctcccgcctcgacctcccaaagtgctgggattacaggcgtgagccatcgcagcctgcccctgaattccataatttcacgtgtaattagaattcaagacctttttcttgaatattactcttgtccatattaatttttttctgagtatggctctagctttatcatttttttctgacttaactctgattaacctcttttttcatcaccagtacttggcagattttgtagatttctaaactctgaaaatcactgtttttctgaaaactgtcatttgtctcatactttcctccaaaattatgaattataggaaacaccccaaagaagtatcatttacattagctgtttacaagaaaatacagggtttcatttttaattttattttcccctactatctctaaggaatacaacttgtcttgaaagctccctgacagcagctatccatttaatctgccaattgcagtataaaaattggttattaaatgaaaaacaattgtatacctctcacagaggttgtcatatattactatttttgtcagcattctcacttataactctgttaggataatcctgggaaaatttctaaaatcttcatagctctttcgttaggtacatattccttgagacagaggaaatctgagcaaagtaaatttcttcattatcttagatcaacaaaagtgatacagagcttctgtcctgttagctccctttggacgcttaaaataggcactagaggttgtccagtaaatgcttcatatccatctactagtgctgaatatttgtgaaaatataggtgataatgaattagactcgtttgaatggaattaagtttctgtaaagttttaccagattgtcttttttttgttttttgttttttgttttggtaaaagcagttttgcacctgtaactaatttaaagacgaagaaattgcacatgtaactgatagcaactgccatccaactcttataacctcagaatcaagatcacgtggctatttgagtacacagtgttttaaaccgtgtaatttttatttgagcaagggattgccaacacaagatcgaggttcccacaagtggtgaatggcacttgtggttaacactgtaaagcagatttaaaacagtcaactgtcaattgcctacaagggaattattcctcatcacctcatgccaggtttttatatggccttttagctgaccttctaaatgagaaactttgccatccagtgcaaactgccaatagtcctaaaatgcctatctttattatcagtctaataatatttattgagtgccgattttcaaggcaccatagtgaatgctgtgaaatctagacactttttccctggctttcaaagctctttataatccaggcatattttatatattttaccttatttctcaccacattccaggcattggcctgtcttgctctgttcacactaatctctttgtcccaagagtaaggccgacccacccttgctccaagcctagtatgtcttgaaatgcctttcctaattcttccatcttttcaaatcgtccctgtccttcaaggtcagcttcaagtaacctctactccgtgaagcattctctgaattcattgctgttcattgctccctctctcctctaaactgaaaatgtgttcagaatatctctcttctgccgcttccactgccttcagcccagtccaggacaccgtctgtgcctggctgctagtctcttgatggggttttcagcttccatcctaacctcacaacagcctagtctcaaccggtcacccacagagatgatgctcaaatgtgagtcagatccgtcactccacccatagccctgcagtggttccccatttcacttgtaacaaaagtccaagtctggcccctacctcctgccctaccccagctgacccctctggtcttctctctctcttccacccactctgctccaagcacgccggcctccttgctgttccttccacattccagatgctctcctgccttcgtgcacctgccccagctcttgttcctgtccaggaccctcttcctctggcattctctgggccacctctgtcaattccctataatcttggctcaaatcttaccttagagtgagggtgaccttggccttccctatcctaggacaggggaattacatatcctccccattgcccttcctcctctactctacaatttcctatttaaaaagcatttatcgtcttctaacatgccatgtaatttattggtggattctatgtattgcttactgtctgcttcacctccctggaatgttaaccgcatgaaggcagagatctttgtctagtttgttcacccactgatgtattccaaatacctgaatagtattgctcattaatacttgctaaatgaaagaatagaatcctctaacacttacggcttctatcacacaatttagccctgagttcaaactgtctggtattatttcctgttttatgtattccctaagccaaatcatatagtcactgaagaaaagatccatgttttattctatattccacaaatgccaaacacataataagtataatcaggtcttgttgacttattaataccaagctgatctcctaaggtcagagactggaatatatttagcaaataaatacaaaattttagtgtatgttaaatattattctaaaaccaatgctaatataaacaaaccaagtactggatatgctacaaaccaggcacaaatatgttttgaattatctgttagttaatttgcaccgtgtccctccattagtttgagtagcattcattgaatatcatttgaatattaatttaaacatcatttgtttgtgagttacccaaatccctggcttcttctgcaaatctacccaccttttgatacttccattatttatttgaacatccaaaacacttatttgctagcaatgtttaaaaaagagtagcttatttaattagctaatatctaatatatgaagcacttaaagtattaattgcctgatatgtaataggtgccaaacacgtcagttctgtcttcttctcatctttaaaatggaagttaatacagacataatgtctccccttgggtcttttaagtcagatctttaggaaaaagtaaaatattctcattattcttattattttgcttgcattagcaataaagtatgcctgatttaagttcactggacattatcttactattatctatactttacctaaagccctgcctttagttttgtaaataaaattatagacctattagatagattgagcaagtttgcttagtggattaaaatatgatgctaataagagccaaagtgagtttgataatgggttggccagatttacacagaagtctttgccatttacaaagagttctgtttgccattgatacagtcacatttctagccacaattacccaagatatgtaaacagttaactcaggagaaaccaactcaattttcaggtatatgccatatacaaaatctcatcacctttgctattatatacacttagtattatttcttaagcaatatcatgtaatataaggggcacgttgatgacagggacatgtacctttttcttgggatttcaatatgaatgaccatccaaatcttgatcatcccaatggctccacataatttggacaccatgtctaccagaaagctatccctgattatttcaggacatgttagtatctttcttttccacatttctaaagtacttactatctctatcacgagtctggtctctgtacttccttctgctactaaacatctctcaccttggtaagcttctcaagaaccacaatactatgtgtttcttgtaaggcctgaaaaacaccttgcacgtagtattaggtgattagctatcttgatttaaggttttagattactgattgaacatttactgagctgaagatatagagaaagaaaaatgccaaagaaaataaaatgaggaagtttggaaaagagaaacacactagtaaaatatgatggtaacttctaagaagcaaggtttataaaatagattgttgatacaaagaaaacattataaaaaaatgggtagcttgaatggatttaacccccaactttatttaatttaaatggaatgcctcaaaagactactcagctgatccaaacatagtaacttcccaaacacaagactcttgacgtaggcctcagaatttggggaaaaaaattcctgcattgtttaaaaatacagtgtccttgtaaagcagaataggccttatatacaagccaaatatatcagttctaaagcaaaaacaaaacttttcctacttactcttttatttcttttttttttttttttttgagacagagtctcactctgtcacccaggctgaagtgcagtggcgccgtctcagctcactgcaacctctgccccctgggttcacacaatcctcctgcctcagcctcccgagtaactgggattagaggcacccaccaccacgcctggctaattttgtatttttagtagagacggggtttcaccatgttggcagggtggtctcaaactcctgatctcaagtgatccgactgcctgcacttttcaaagtgctggattgcagatgtgagccactatgcccagcctgcttcactcttttagataaaatgtacaccctttgaatttttacttccgccatttacactgatttgaagtccttggttgaatatgtatttagccttcactgtgcaaggaagctggttacaaaaacagatagtttattaaaatacttgtgttggtttttaaaaaagaataattttaatacagtttttctcttctttctttttgctctttttgttattttttaatagagacacggtctggctatgttgttcagactggtttcgaactctggcctcaagtggtcctcccatcttggcttcccaaagtgctgggattacagatgtgagccaccatggctggccttaatactgttttatgagttctgaattgaataatttttaagtgaatgtcctaaaattctatgacaatccttttaacacaactggaagagtttttgttggcttacttggtttgtctgcatgtttccttctgtcatcccccactcctaggacccatatggaacattctctcttaattaactcttttattgaagtataatatacttagaggaaaaatgtccaaatcattttcacaagtgaacatacttgcgaaattagcacccagacaaaaaaaaaaaaaaacagaacaataccagcactccagaagccctctgactattctaatttctaactcattgttaagttttgcccagttttgaattttatataaataaaattacacattgtttactcttttgtgtctggattcttttgcttagcatttattcgtgagattaatcacactattgaatgtaattgtacttcattctcattactgtatagtgtttcattgtataaatatatcacaacatatttatcctactgttgatgggcattcagatggttttcagtattgcaaatagtactgctatgaacattgtcctgtaggtctcttagtgaaggagcgtatgcatttctggtagctatatgcttcagccaataatagagtatgttgagcttcaggagacgttgccaacagttctgaacaggactctagaaatctatacttctactagaagtgcatgagtgttctagctcttctacaccatcactggtacttggcattctctgtctttttcacgttagccattctgatgggtgtgttggtatcatattctaattttaatctccccttttctgatgtctaaaaagttaaacactttaaaaagcgtttgttgtccatttggctatcctttcttgtaaagtacctgttcaagtctttcacccatttttatattgagtactttaggtaaacgttctaaagcataccttgtcagatacatgtattgtaaatatctcctcttactctgtgtgctttttcgtttacttaataaacagatatttctaatcaatatagtctgatatactagatttttcttttacagtaagtgctttttatatcctttggaagaaagctttgcctactccaaggttgataaagtgtgtttttattttaaaagttttctggttttatatttcacatttagatccataatccacacagaattgacttttgtgtatgttgtaaggcaagggtttatctctttcatggggatatccagttgacctgcttcgtttattgaaaagatcatcctttgcccactccccagcagtgacatttctgtcataaaccaggtgaccatataggtctgggatttattctggacttactcttctattgcattgtatttttgcaccaattaagattgccttaagtactgtaactttataaatagtttgatatctggtagtataaatcctccagcgttgctcttccccttcaagatttccttgccacttggcctcttgaatttccttataaattttagactcagcatatcaattaccacacaaaagtgccgagattttgattggaattgttctgaatctatagataaattgggagataattgaaagctttacaatattgagtccttcaatccatgaacatgaactatcctttcacttatttattctttaatttttttaaatagtatatttgagttttcattatggagatcttacacatattttgttagattttttcccctgggtatttgattgttttaatgctgttgcaaaaataatttttaaatttcattttctacttgttgctggcttatagaaatataattggtttttgaatattgaccttgtacccagcaactttgctaaattattttattaactataatgagtttttttgtggatttttaaaaacacagtctgcctaacatggtggctcatgcctgtaatcccagaactttgggaggctgaggtgggtggatcactttgagctcaggagttcgagaccagcctggccagcatagtgaaaccctgtctctactaaaaatacgaaaaattagccaggcatggtggcatgcccctgtaatcccagctacttgggaggctgaggcaggagaattgccctaatgccagaggtggacgttggagtgagctaagataatgccactgtactccagcctgggcaacagagtgagacttcgtctcaaaaataaataaataaataaataaataaataaataaataaataaataaataaaacgaacaacaacaacaaaatacagtcatgtcatctgtaagtaatgttagttttagttttatttcttcttttccaattattctttgtctttttcctttgttgcattggatggatttccagtacagtggtgagtagaagtaatgatagtatcattaccttgttgctgatctcaagaggaaggctttaaatatttcaccatcaggtatgatggctactctaggatttttgtttgtttatttgtttgttttttatagattttctttagcagactaatgaagttccctttccttcctaagaggttttttatttaaaaaaaaaattatgagtgaatgttgaattatatcaaatgctttcatagtttgttgtggtggtggttgtttttgagacagggtctcactttgtctccaagctggatcatggtgcattgcagcctcaacctcctgggctcaagtgatcctcccacctcagcctcttccagtagctgggaccacagcacatcaccacacccagctaatttttaaaaaattgttatagagacagggtctcactgtgttgtctaggctggtcttgaactcttaggctcaagtaatcctcccaccttggcctcccaaagtgctgggattacaggtgtgagccactgtatctagcctagaatattttttatagtgctcaggagaaagattaaaagtatgaaaagtgtctactatgtatactttaatatcatattgtaatacatttgaagatactatatggtataactaatgaaaatcttcaaatcagctcataaccactagagatctggctgtatctgttttgacacttttgttctcagtatctgtttagcttaagacccttgtcttctcattaagagtgcttgacacagtaagttgaaaacataatttcaaaagagcatagagtgtcacatggtttgccagactaaacaactctgagtaagaaagtggctttccccctatggtaatgccaagctactagaggaccttcagtggtaaagtatgatttaaaaccctgaccccatctgtcttttcccatttgcagtaagtcctttatagtgtttgaaggtgggcacagcagggaaacagtactctggcagatctgcggtggctccctcctttctgagtcattacacactcttctggatcattcctttcatttttccttttcctctcctctcccctattttcattcccctatcactgcaaagccaaaaccaaaacgtggaaggggacctagccgaggaaaacattccagcttcttttttctgatctaaacaccgttcttcttcttttttattttttaattaataactttatttttagggcagttttagtttcagagcagaattgagtaggaagtacaaagagttcccatatacttcctgtcccccaccacgcacaatctcccccactatcaacatcctgcacccaagtggtacacttgttaacagtcaataaacccccactgacacatcattatcactcaaagtccatagtctacattaagattcactcttcgtgttatattctctgggtttgtacaaatgtataaggacacatatccaccattgtagtgtcatacagaatattttcactgacctaaaaatcctctgggatccacctgttcattccgttctcccccaaacttctgactaccactgatctttttcctgttttgatagttttgcgcttcccagaatatcatatagttggaaccatacagtatgtggccttttcagtttgacttctttcacttaccaatatgcacttaaggttcttccatgtctttccatggcttgatagctcatttctttgcagaactgagtaatatttcattgtttggatgagccatagtttatccactcagctactgaagggtgtcttggtgcttccaagttttggcaattatgaatagagatgctataaacacctgtgtgtgggttttttgtggacttaagttttcaattgatttgtgtacctaccaaggagtgtgattactggattgtatggtaagaatatgtttagttttataagaaatggccacactgtcttccaaagtggctgtaccattcatcagcaacgaatgagagtttctgttgctccacatcctcatcagcatttggtggtgttagtgttttagattttagccattctatttgtagtggtatcttcttgttttagtttgcagtgctctcgtgacatatgatgttgaagatcttttcacatgttcacatgccatctatatatcttcttggatgaagtgtctattcagatattttgctcatttttaaaacagggttattcactttcttattattgagttttaagcgttctttgtatattttggataacagtcctttatcacagtagtccctgacctttttggcaccagggaccagtttcatggaagacagtttttccatggactggggtgggcaggaatggtttcaggtgaaactggtccacctcagatcatcaggtattagattctcatacggagtgtgcaacctagatcccttgcgtgcacagttcacaatagggtttgtggtcctatgagaatctaatgcagccactgatctgacaggaggtggagctcaggctataatgcttgcccatcagcagttcacctgctgtgcagcctgattcctcccaggccatggactggtactggtctggacctggaggttgggaacccctgctttatcagatgtgttttgtacagatacattctccccatctgtggcttgtttactcattctcttgacactgttttgcacagagcagactttttttattttaatgaagtccagataatcagttatttcatggttcatgtctctggtggtgtatctaaaaagtcctatccgtgctcaaggtcatctaggttttctcctatattgtcttcagggagttttatagttttgtactttacatttagatctatgttccattttgagttaatttttatgaagagaataagctctgtgtctaaattattattattattattgttattattatatttttttgcatgtggatgtccagttgctccagtcccagttgttgaaaagactgtctttgctccagtgtattaccctggtttcttcatcaaagatcagctgactacatttatgtggtcctatttctgggctctgtattctgttcctttgatctatttgtctattcttttgccagtaccgtactatcttaattactttaactttctagtaaggcttgaagtcaggtaatgtcagtccttcgactttattcttcttctttaatattgagttggctattacgggtcttttgcttctccatataaactgcagaaccagtttgccaatatccacaaaataacttgctgggattgttattgtgattgcattgaatctatagatcaagttgggatgaatgacatcttgacaatactgagtcttcctatccatgagcatgcagtgtctctccatttatttcattctttgatatctttcatcagagttttgtagttttcctatataggtttcatatatattttattaaatttatacttaagtattttacttttcggggtgctaatgtaaaacaaaacagacattatgaggaaaatgtaatgtctgtttgggggtaatgtgtttttaatattaaatttcgcttgttcattgctggtatataggaaagcattatgacttttgtatattaaccttgtatcctgcaaccttgctataatcacttactaggtccaggagattttttttttttctgttcttttggatttttttatgtagaagtcatgtcatttgcaaacaaagacagttttatttttaccttcccaatctgtatcccttttatttccttttcttgtcttgttacgttagctaagacttctagtatgatgttgaaaagcagtagtgagagaagatatccttgccttattcctaatcttagtgggaaagcttgagtttctcaccattacttatgatgttaactatatgttttgtttgtagatgttcctaagtttaggaagttttcttattttgtcaaattctttttctgcatttattgatatgatcatgtgatttttcttctttaggctatgggtgtgatggattacattaatttgttttctaatgttgaaccaaccccacataccttagctaaatctcacttggccatggtgtataattcttttcatacattatcggattcaatttgctgatattttgttaaagatttctgcatgtctgtccatgagagattggtctatagggtttattttccttgtaatgtctgttttgttttagtattagggtaattctagcctcattgaatgagttaggaagtattccctctgcttttatattctgaaagagatttcagagaattggtataatttcttccttaaatgtttggtagaattcaccagtgaacccagtccggtgccttctgtttcagaaggttattagttattgattcaatttcattaataaatgtaggcctattccatttctctatttcatcttgtatgagttttggaaaattatgtctttcaaggaatgagttcatttcacctagattatcaaatttgtgagcatagagcctattatcctttaatgtcaatgagatctgtaatgatacccctctttcatttctgaataactttcattcattcttcacgtactagacaaagtagaatttcaactaaaccaaagcaactgttcaacagatttagccttagtcctaatcagattattagtaatatctccctttagaaatatatgaaggtacttttagcagaggaaccaagcttgagctagtttgaccataatgaatttttgctgaggaagcagaagaaatgtttatattggtgagggcataatcctgtaatcttttctgtgtcctgatacctcaggaccagcgtaagcaaactccctagacaagatgtggctcatgcaagaggaaatatgcttttgaaaatgaacatgggccaagcatagtgactcatgcctgtaatcccaacactttgggaggctgaggcgggaggattgcttgagtccgggagtttgagaatagcctgggcaacataatgataccttgcctctacaaaaaaaaaaataaaaataaaaaaataaaaataaaaaaattagatgaatgtggtggtgaatgcctgtggtcccagctacttggaaggctgaagtggaaggatcacttcagcacagggaggtcgaggcttcagtgaaccataattgtgccactgcactccagcctgcatgacagagtgagaccctgcctcaaaaaataatagtaaaattaaataaaatataataaaaaacatggtctttctaataccctttgttgatctgaatttgaaaatttcctgtgagaccttctggcttattataaagaaatttgcatctaaagatacatattggaatgtttcaatctcaaagctatcaatgggaaatcaaacttcagaaacattgaatttggttttgaatatagtctaagtagacaataaaatgaaaatacatttgtttatattgaagaagcaaatgacacaccaaatagttaatttctaatagttttcatttttttctttttcttttttgtttttttttcagacagtgtctctctctgttgcccaggctggagtgcactggcatgaactcggctcactgcaacctccatctcccgagttcaagtgattctcctgcctcagtctcccaagtagctgggactacaggcctgcgccaccacgcccggctaatttttgtatttttggtagagacagggtttcaccatgtaggccaggctggtctcgaactcctgacctcaggtgatcctcccaccttgtcttcccaaagtgctgggattacaaacgtgagccaccacgcccagcctctaatcattttcttaattcatggtgcccaaaataaaagattctatattcagagaaaccatgacagaatttaaactctagccccaatacctatttaacattgggcaagtcacttaacctttttatgtctaatatttttaatctgttaggtggtaataatacttgtgtataacaacataggactgtttacaacaagcacttaataattgttagctattgttactaaattgtatttctgctgatgggttccagagtcttttcctccttcactaaacaaaactcaggatactatgtgaaggaaaagaagtgagttggtagaatttattttttaaatgcttgagtcaaaaggagagccatttgtggctgaagcatcaaaaccattttctgattttctttcattctacttgaaactacattaaaattttctccaattttccagatgattgcatgataattccttttaagaggactttaacacatgtaagaaatagagttactccctctgttaggagaaatcatggaaagatattataattaaaagatagtgaattttagcttaatttttacctttatctaaataacactcgtacacagctacagctttcagtgaagaagagatactcattcccacagctaaatcccgctcctcataggcagtgattttacctctttcacatatttcttctggcatttaccttcctatctctagaataacatacttacattaatggccaggcatagtgactcacgcctgtaatcccaacactttggtaggtcaagatgggcacatcgcttgagcccaggagtttgagatcagcctgggcaacatggtgaaacctcatcagtacagaaaatacaaaaattagccagcagtggtggtgcatgcctgtggtcccagctacttgggaggctgaagttggaggatttctcgagcccgggagtttgaggctacagtgagctgtgattgcgttacagcacgacagcctgggccacagagagagaccttgtctcaaaaataattataataataataacttatactattatttttaaaattgtattcttatccattgacttcttactgtgggagataataatttagtccttttactaccatattcccttttccaaaacacatacttctccctcccctccatcttcacaatgtagttacttgtaatttggggttaaatcagttgtctgtgcttacattgtagtaactgaaagtgctgcttaaggttgagccaagcagtgtgctatgattctgtttcctctcctgcttagctatttacttttctggagttaatttttgtcacttagtcattgctcattttgttgtcatttcttgctatgtactcatcactaattcatcctcaaactctctgacagagtaataaaaactcctctgaaagtggtcagacatatcgggcattctggtttctcaggtgatcccacctggccttcttcctcctgcattttctctaggctgctctgtatctgtagcctgggactaccttccacctctctcctgtctttcagatcctttgtttcctggtcccatcttttctcttcttggttctggtggagaactctgggaaagagtacgtgggaggtaacttttctggatgccttatcattctgaaaatgtctttactctcatacttgatggacgatttggatgagtctaaaattctaggttggaaatttttttttctcttgaattttggcaacattgttctattgattttctagcttccagtgttactgttgagaagttcagtgtcattctgattcctgatcctttctatggtactttttttttttcctgtcaggaagtacttatgatcatctctatagaaggggtattaatcttgacagtgttcctttctgtgtggtttaagaaatcctttctctcttgggttttgttactgttttataaatccttgatcttagtcattctaaggttaaagaaaaactgaggaacaactcaggaatacgtttcaagtacatgtgataaaaggcaaatatgcagaggatgataactatatgtttaaaaaatgggaaaaaagagatagtcgcaaacttcaacataggttagatcatcatttctcaaaccatattccatcacatattaagctcctcaaatattgcacactgtgcttttttctctcttttgtgtattctcgtgaacattagcctgttagtttaagaagtctcacagtaaacctatttaaccttgcttaacctagcattgcctaaatttacttgatcaccagattttttttgttttgtttttaattatttttaaaggaacattattaacatatgtataacacagttggggaaatgccagataagacatagactttcctggctgctaaagagcaattaagcattggaatgagtaaccaagaggagctgtggactctccttttccagaggcctttaaaacaggacatctgttttaggcgtagtcctgtttaaacaatagggctttgctggcggttcttcctcttcctgtcccctagtggtagtgttggaggcttttagcccaccttttatatgactgtagtactctggtgactaatgtgtacacaaattactgttatactattaatattaattatatttattgagaacttattaagtatccagccctatggtaagtgctctacatacattatctaatttaatcctcacaacaactctaggagggagacaatattaatattctacagatggagattagatatgaagagatacgaacttccagcaatagggttggattggaacctcgggcatctgacatggagctgtgcccatccttcttcaccgttaatgttcaaaacagcaaacggcacaaagcaagcaaacaacatttgtatatctgtacttactatgtaaaaacaaaccaagataatgcttactttattagactattcaagactattccctacgccttttgattaattcagagttcatgacttttgttagaaacaaattctgttacagatttagttcttcgcattttattctgtgataatttgccatccaggaaatggttccttacatgagactttttccctcataaatttgatgacattcatatacattcactaaagacccccaaaaaataaatctggatctgtgaaaagtggcaaaggttaaaagtcccattttcagcatatttacatgtagtaacaacttgataacacagcgctgagaatgccaggctcagaggagccaagctgggctcccgtccagtcagcctctagctcaccaggaaaccctgagcaggtcactttgcctcattttctttatctgtcaaatgagaactcagatgatctcaaaacagccttttctgctgtagtgtttcaggatgattcttgtctctggatgtcgctgtcatgatgggagaggaattagtaaattcccaggtcagtttacactgcagagtgatcttgatctgcatgaatcagtaaggatgggctggataaacaagttggaaccacagttatgagtaccatgacattaactgaaacaaatgagaagggattgaaaaatcggcggttaagtgtcttttaaggtcatttccaacaaaactacaaaggacctatgaaaggcttttcaggcacgtactcttgttgcctagctgaacacatttctccaataaagctttcatttgagagttactcttcatagtacatcccctgcccccctgcctgcctggcacattataggtattcatgaagatttgttggaactgttaaataattgtttaatatagaactggaagatcaggaagaaataatgtttttctaaccagtatccagtgtaaagtcacaagtgtgggctatggagcttcagaccatctggattcaatgccagttctactgcttagttactgcgtacttttaggcaagttacttacttccaggtccatgcctcagttttcccatctttaaagtaaattataaatgcacctacttcctcgggctggttgtgaggattaaatgacacaatccgggcacaatatttggcgtagtactttgcacagatttagtgtcctgttagtattagctaatgtaaatatgaagaagatgtaacattttaccagctattctaatcatagcttttcttttcttttcgtaagggacaacataaaaccccaaaggtaaagcatatatttctggtgttcaattttacaatttagcatcttttccaacccacttccatactcccaaataataatgcctatcagattaaagaagttactttatttttgcatgaaattggttgtatttttgttgcactacttcatcctttgagtattgtgaaaagtctgcgcattgactataatagcatttaaagccaagtttgaaggtctaagataatggcacacatccatgtcctttgctcacaagttctgcctaaagactttagcctgcttgaaacactctaaaggttgtgaaattaatggatataccactgatgcaacacaactcagtgtcaccagctagggagttaagacatgttcttgttactgagaagggctgttgttcatgcaaatattttgttcatttgttctttcatgggtaattgcacggagtaacaaaaaacacctcctcaacttacagcttggcagaaacagtagcttatgttttctagagacaaaattagaagcaggctttctggacccatctctaagtcaaaataaaataaaatgtctagggaaccactgtgcctcccagtaactatggtccatggaataatattgtttaggtcaaggtgtcccagagtaaaagggaagggagaagggcaggggggaaggggaaaagtgtgtttgggcaatgttttcatagagatgaagaggcaagctgtttttctttcttactttgtcctttcaacttagaaaaataagaaaaccatctaggaccacaaccttcctcttgtaatcagcaaaagagaaaaaactgaatatacatcgttaaggggaatggttatggcttaagttgtattttattgataatgttgaagattaacattttttggagagaacttaagtcttaacaaaactaaactattgagaaagtattgttatttttccatctttagtagcaaaatgaaaatttactctactcttctgcataaaatatgatcatcaattggcaagaatttggttaaaaaaaaaaactgtgcatagaatatgcacatgggaagatagaataataagatgctgtccttttactccagactggaagtctaatggtggagatagttatccagataattatatctgagttaaaggaggaggtacaaagtgctgtgggaacacagagaatggagtgtttttaagttggaggattcatagatggttttacagagaaagtagcatttggactgggttttgaaagacaaacaggcttgtggcatgaagaggtgaggagtaggaagaagatacagcagcctcagtaacctgtatgactaaaagaggcagggcatgtttaacctgggcagatagtatgatatgcccagccaccagatatgccaagaatgggagcgaggtctgggataaccagtggaaataagactgaaaaagtaagttagggctgagacatagagggccttgaatgccaagctaaaaggccagtgtttctcctgcttttccaccagtatgcccttactagtagaggacagcaaaaccataccattcttgggtggaggaagggaggaatgaataggtggagtatggggtatgtttggggcagtgaaactattctgtgtgatcctctaatgaatgcatgatattatgtctttgtcaaaacccatagaacttggctgggcatggtggctcacacccgtaatcccagcactttgggaggcagaggcaggtagatccattgaggtcaggagttcaagaccagcctggccaacatagtgaaaccccttctctactaaaaatacaaaaattagcagggcatggtggcacacgcctgtaatcccagctactcaggaggctggggcaggagaatcatatgaacctgggaggtggaggttgcagtgagccaagatcgtgccactgcattccagcctgggtgacagagcgagactccaccaaaaacaaaaacaaaacaaaacaaaaatgtagaactatgcaacagaaagagcaaaccttgatgtaaatcatggactttaggtggtaataatgtgtcaatattggttcatcagttatagcaggtatactacactgtgcaaggtgttagtaataggggaaaaccatgctttgtagagaggggacaggaggctggggaagggctattttaagagctctgtactttctgctcaatttttatgtaaccctaaaactgctctcacaaaagtaaaggctactatgaaaagcaaaacaaaacgaaaacagaaaacagcatccttttagccatgagatgtactacaagtacagagttttctaggaatttcatataatatttttaaaaattacatgaacttttccttctttccttaacacatagatggctattttcacattaaaaattttcccaaaatttccacaatgtaatacacgacccctagggatatgacttttgtaataagaagcatgactttggctgggcacagtggctcacgcctatattcccggaagtttgggaggctgagccaggaggaccacttgaacgcaggagtttgagaccagcctgggcaacacagtgagatgctgtctctttaaaagtgaggttggggaggtgggagagagagagagagagagagagaggaaagaaagcagcatggctgtgattgataggaagtcactgaaattgtatgttaaaaatgaaacaaagcaaaattaaaccagtaaaatcatgagcaaccaatttctctcccaccccagatatttgtgcatccttattttcatttcccagtattcatacaaaagcatatccactacctttaactcactttgtcagcctttattctgtatgcagaaaactttgcaatagcatagtgagaaataggtgataaacccacctttgtggatattacagtgtagacaagggaaatatactttaatatgaaaataagttatactaagaaaagtagatacagaaatgaaaattaagcctgccaaggagacagacaaagtaaatggaatgacctgggttagacaggtttggacgaattttgaaacaaaggacacagttggatgggtgccctgtccttaggagcacagacttttttctggatgtcattgagacctagaatgacctttaactatcaccagtacacattcccctttttggtgtgcagtgttgacactgaaacacagataacttaaggttgtttgggtacttatttatgtagatagacatgtgaacccatacggtacctaattagtcctcttgaaaccacaaacgcgcattcacaggaccagtcttgtttatattttcaaggctttttttttttttcttttgagttggagtttcactcttgttgcccaggctggagtgcagtggcgtgatctcagctcaccgcaacctctctctcctgggttcaagtgattctcctgcctcagcttcccgagtagctgggatcacaggcatgcaccaccatgaccagctaattttgtatttttagcagagatggggtttctccatgttgatcaggctggtctcgaactcctgacctcaggtgatccaccctctttggcctcccaaagtgctggaattacaggtgtgagccaccgcacccggcctcagggcattttttcttatgaagatgacagccgaaatcttcaatcttcaactcatgcaaaagtttgcctttggagtgaatttcttggcaatctgcttggtaagaaaaagcaagtggtgttaaagtgagagcattaaaataaaattgctccaaaaaaatgataaataaataaaagaaaagaaaaaggaaaagcaagaggcccatgcacagatacacagaggagagtggcccctcctccataagcctgtttcatcaatgagagaatcaagagagtatgtatatacagaagagagtttcagggtcagtcttgagtttgcatcttctacttcctagctagaggaccttgaacaattcactttacttctttggtcctagcttgcttatctataaagtgggaataatatttcagattatgcagaagaaaaggtaggatgtaccgggcacatgggaagtgcttgatcaataccaatttgcttccctccttccctgccccttctgctgaaacttcacagctatctcattaagtcatcaatgtatttagtatttaataaataaatatttaacgagcacctactatgagacaagccctttgttagccagtggggatatgactgcaaacaagaaagatacgcctatgatttgatgaatcctggagtttatgagcagctcatctctgtctcccgtgtgagcagtcctaaatttacacagctctccactggtgtttttgaccacagagttaacatttaaaatacctatgactgcttttttggcaccactttgaataatgaactggtgtcaggtaaacagagtccaggtacctattgcagaaagttttccagtctgcaccctcggtggctcacaagttcacatgaagtgaaccaaaagagttttgttgcacttactgtgacaataaatcatgtttagaaaaatgcatgtggcatacatgatattgggcaaatgattcatgaaacttgctattctgtggccttagaatccatgtaagcatttttcctttgtcttttatgtgttttcttgtttctatctctgttttgttttgtttttgttttggggatggtttaaaattaatgctgggctagagtctgattttgacactctcgggtgtgatcaaatgtttccacatatctctctaacctttctattctcaatgtggggaaaactttctccgctttaagaaaaggtgtatccacagaaaagattattgagtaatttttcatagtacagaagtaataattgagtgatttttccctttaaaatttttttatttttgtattattttaagaacaaaattattttaggatgcaattaaagaagaagttcatttacctaaatttaatttgccaacttttctattacacaaaagcattataaatacaagtagaatagcaaaaatttcatcctaaagagaaaaatattttgggcttctaatttcaagagagtaaaattgtcctggaaccctgtgcacactttaaaaacaatcattaacagattgcatcaaactagaaacttcttcaccacaaaggaaataatcaataaagtgaaaagccagcctacagaataggggaatctgtacatctgatatgaagttatggattgcaaatcgtacatctgatatggaattaatattccaaaatatgtaagaaactcaacaaactcaattgcaagaaaacaaataacccagttaaaaaatgataaaggaatatccatttctagaaagaagacatacaagtggccaacagatatatgaaaaggtactcaccatcactaatcatcagggaaatgcaaatcaaaaccacggtgagatatcatctcacacccattagaatggctgttatcaaaaacacagaagataagaagtgttggcaaggatgtggataagagggaacccttgtacactgttggcaggaatgtaaattggtatagtcattatggaaaacagaatggactgcctcaaaaaattaaaaatagaactagcatatgatctagcaatcctacttctgggtatatatccaagggaaatggaatcagtatgttgaagagctatctgctctcccatgttcactgcagcattattcgcaatagccaagatatgaaatcaacctaagtgtcaatggatgaatggatttttgaaaacacagtatatatctgtatatatatacacacatacatatatacacatacagatgtatatgtacacacccaatagaatattattcagccttaaaaagagaaggaaatcctgtcatttgcgacaacagagatgaacctagaggacgttatgctaagagaattaaactgggtggtatttgacacagaaagacaaataccacatgatccacgtggaatctaaaaaagtcgaactcataaaagcagtgagtaaaatggtggttgccaggagctggagggtgagagcaatggggagatatcagccagagtttcagttatgcaggataagctctggtcaccttctaaggtgatcatctgctaagtataggtcaccttcagcatggtgactatagttagtgatactgtatggtatatttgaaatttgctaagacagtagatgttaagtgttctcactacacatattcatactcaaaaaggtaactgtgaagtgatgaatatgttcattaccttgattatgataatcatttcatagtaaatacgtatattaaaacatcacattgaataccttaagtgttttgtttgttttttggttttttgggtttttttgttttgttttggtttaggttttttttgaggtggagtcttgctctgtcacccaggctggagtgcagtggtgtgatctcaccttactgctacctctgcctcccaggttcaagtgattctcctgtctcagtctcccaagtagctgggattacaggcgtgctaccacacccggccaatttttgtatttttagtagagatgaggtttcaccatgttggccaggctggtctcgaactcctgacctcaggtgatcctcctgcctccgcctcccaaagtgctgggattacaggtgtgagccactgtgcctggcctgtataccttaagtttaaaaatttttgtctattatactcaataaagctggacaaaattttaaataaataacagcagtcattaacagactcaattgatgacctaatgtagaagttaatgagagcaggcctgttggcaaaaaggcatttatatggatacactgtatgtatctgcactgtttcaggatcctctattatgatacctgggtaaagggtgacttcctttctatcataaaacagcctagacagcactaagaaggtggttatgttcttttctgttgttgtgagcgcccagatgagattactttgccaaagactcttttcatttctctttctgaaactctgtgagattgctgtgttctctaggacttaacttcacagctagtctatttttcctttcagaaatgaccatggttgacacagagatgccattctggcccaccaactttgggatcagctccgtggatctctccgtaatggaagaccactcccactcctttgatatcaagcccttcactactgttgacttctccagcatttctactccacattacgaagacattccattcacaagaacagatccagtggttgcagattacaagtatgacctgaaacttcaagagtaccaaagtatgatgtttattttcacttttcagactactaggactagaattggactcatctctcagtaaccctgtaataaataatgctccagagactagaaatctaatagagaaggcattcaccattcatttattcacccatttatccatgaaatattaggtatctatgaaatgccaggaagggagctggcacgaggtcaatcttgccttccccgccccctccttccttcctctcttctttcctttcttgcttacttccttcttagggacattttctaccttgattacactgtcagttgtatctcaggctaagagtccatcatccaaactttgaattattttggccccttataagttaataagtaacaattccaagtcactttgtattatataacttatcttcactatattactgctactacagtacattttttctagtatgtcctttcaggagtttatactgaaacctacttttaagcacaaatttgttttaacattgtagcctattgataaattttcatgccattaactaaatcaacatcaaaacatcagactcaagaaaaactagaactgcactttttgagataaaatgtatttctgtgatgctatttccttgatttttatcatgtgtgggctgacatgctggttttccaaagccaccactatgtaattggcaatcattacttgacaagtaagaacttcctgtatttctagtggcttttaaagataaataatatgcttagttatatttatctatgcggttttcagttagagcctaatatggaaatttagtagccctgagcccaactagtaaaaggtagggcttacttccataagttccgccacgctctgtcaaagattatttcacaaaccacctcctttgactgaacactaatggtaacctgggctcatatttttcatgcacctcaagctaggcataccatgaccttttcacagtggtgttccttctgtggttcttttgcaagttgtttcaaagtacttataaaatggaatatttaaataaaatgtataatttaatattgtgatgaataccaaagacagaacatttcctagcaaaataagcttccttgtctcaaatcctctatgttgtctgttacagctgtagtattgcaggctactgggggtcatagaaccacagacttaattctcattcccattttatatttacaggtgaggcttagagatgttataacttgcctgtgattacaaacctttctttttcttgccttaactccagtgttttttcatgttccactgtgcttttacactgaaacaatacaaatacagcatgaaggtgtactatggtggcttgccctgttgcctttttaggactgttttcatgggataattatcctctcacatgtctccatacacaggtgcaatcaaagtggagcctgcatctccaccttattattctgagaagactcagctctacaataagcctcatgaagagccttccaactccctcatggcaattgaatgtcgtgtctgtggagataaagcttctggatttcactatggagttcatgcttgtgaaggatgcaaggtaattaaaaaaaaagtcttcaaagaaattgttgaaactttattatttcatttcagcagaaccccttttttaggtgatacaatatatgaattttttttcttcatggaagagtatcttgctctgtcacccagaccagagtgcagtggtgctatcctagcacactgcagccttgagcttctgggctcaagtgatcctcccacctcagcctcccaaaggatgatataagatttgaaagcctaagaaagtggataaaagttgggctgctttgccccacatttgtttctccaaattgattctttgagacactgatctaatttaatccttgcatcttgcagatttttacaaaaaggtgacttctccaaggtgtcatggcaagacagtgatgacctggaaccaggatgcagatttcctgcattctctagttgtttatttatttatttatttatttattttgctataccgtgtaatattgtatagacagaagattttacagattatttatatatgcatatctttggatccctagagcaatcctataagattggacttctttatggccacattgcagatgtagaaattacaggttagtaaaacttgccaaggtcatcccttagtaagtggcagaccgcagtctagaccctgactccttaggtggtgttggctctcaaagcagtgcctcatgtttccttattccagcatcaatgtgagccacatacacggacaggtaaggaggtataacagtgtgggaaaggagatactatttatcctcatctctttcctttgtgaaaagggtattttggaaaattcagacgtttagtaatttattgcttaattattaagaaaatatgtgaatccactcatattttgatatgcagtcttttaagataattttaatatacacaatgcaaaaatagtactaatttattatatacgcattgcacagaataaactgttcataaatattcactttataaaataaatacctgcttattgggctttttattcaacgtaaagatacagaacaacagttaggaaagttttaggacatcttggttcctaaatggatggtgggccaaaaaaggaaactgatttttattgaattcttactacatgccaaatactgtatgaggtaacgttttcatacatcagtatttaaccacatcctacccaggttttctcatctataaaatgattgtggctgagtgtggtggctcacgcctctaatcccaacactttgggaggccaaggcaggaggatcacttgagcccaggggttcaagaccagtctgggcagcatagtgagaccccatccctacaaaatttttaaaaaattaaccaggcatggtggcacatgcctgtagtcctagcttcttgggaggtttaggtaagaggatcccttgatcccagaagttcaaggctgcagtgagctatgatcataccactgcactccagcctgggtcacaaaagcaagaccctaactccaaaaataaataaataaataagtaaataaataaaatgacactgaattacatgatctctaaagtcccttcaattgaaacagtttttactctaaaggcaacctaatacagtgaaaagggacaaaccagaggtcagctctgccactttccaaagtcattagccagtcacatacacattgtatccttcatcaggccccccatatgtaaaatgacttggttagattggctacacaaggtcttattcatctctaagttctgtaatttcaaaatgacactttgaaacactctggcaagagatgctttcatttaaaacactaaaacccgttcgttctgtaatttaaaccaagttaaaatatttatgaccttatatgaaatcattgtattaagtcagttatctaagatcttgatgagtagtaagaacatgtcattttattgacttagattttttattgaatgttttgtggttttattgagttttattttagatttaatgagttagagtttatttttactgagttggataccatttttgagtgagtaaactgttgctaaattctgagccatatttatctgaagaaaccattctgttttggtcatgttgataatttacaactataaataaataaaaacagcatggttggtttaaggttccacaataagttattgttttttatgggctagtaaagcacttagaaaactaaaacttttaagcaaatagttccaccataatcctattagtcacaaatttgtggaaagctaacattactgaaaacagctgaaaatggaaagacaagaacattgtcagtagttggttatagtgataaatctgagttctgagggcactaaaacttaaaagcaagcagggaagaagagtagcaaaaagagaagagagaggaggaaatccaagtgccttcaacttaggattagaaagggtagaaagcagggagggagaaaaaatacttaataaaacctgaagactctaggggagtccttaacctatcatagattaaaaagcaaacatagaagaaaactaagcgtattgtatactaacctgcagtaatttgcaaaccatccaaaatgtggattccagaattcctagactaaaatgtaaggaaggttttactcccttggaaagggaaaatagacatctacacgttttaaaggtaagaataagaaaaatattattcttggaaaatttaaacatttagtaatatactacttaatataaagaaaatatgtgaatccacttatattttgatatgcagtctttcaaaataattttaatatactcaatgaataaaatagcatttattgtatactgattgcacagaataaatttttcataaatatttaccttataaaataaaccctgcttcggctggggtttttattcggcgtaaagatatagaacagcagttaggaaagaattaggacatcttgattcctaaatggatgatgggtcgaaaaaggaaactttttttgaattcttattctgatttttattgaattcttagtatgtaccagatactatgtgaggtacatttgcatatatcattatttaaccacatcctactcaggttttctcatctagaaaatgattcagatgatattggtaggatgtggttacataatgaaacattatcatttggcttcttcaagtatacatcagcagttcccaaagtgtggtctggggcttggaccctttcaaggcatccatgaagttgaaactatattcataataatgatttttattacttttttcactttcattctctcaggagtgtatgtggagtgttctggaagctacatgatgtaggatgatgacatagctctggtagctaatggaatgtttgcttatgtgttcttgtatataataatttctcagttgtaatttctagtgtgataaatgtcagtaaagatagcccacataaacaaaatctctttggggtcttctataattttaaaaagagtaaagggatcttgcaaccataaagccttcagtctcattctgaagaaatgcagttactcattctttgctactttgaaactagacaaaattgctgccacattctgaatactgctgcattagaccagtggctgtcagtaaagacatctccttagcttataaccaatacgcaataaaaagccaggaaaatggaattagcaaatgtgtttaactcatctgcatgtattttctgagaggtgttttggaagcttcacatttgctgttgtagtaaaatgtgggttatattcataattaaaatacagttgaccacaaagctgcaggcttatctatggattgaaaagaataaacacagcataaaacaacttttggtagatcttcctaaacaattttacaatgtaaatggaacaggtttatattagtgattcttgccaaaaattcagtcagacagatgagaatgagtagattgggtttgaattaaggtgaaatagttacagattcttgggtatgttaatattgcaaacttatgtaaaataaaacctttagcaactgaaagatatatataatttagagcttggaaagctatcatttatttgttgtttacatgttggagatatatttttttctttggtaagttccatcctattttttatctttagtgaaagatcattttggaaccatagccgtacctaaagatataagtaaatacagtctaccatacaatacaatgtaatctaagtttgtatttctgtatacaaaagaatgccgtatgcttgttagccacttgtatgtctattcatccctacttcagaaagagttttaattcttctcacctgccagtcgtagcttattaatccaacttccaggggccagactgcttcatgggaaagccaactgcaagcccagcacagggctgttaatttcattgtaaaatcaacaacaccattctgaggtctcattgtccctgatgttttgttaaaattaaagcaattaaggagagatcaaagaaaatttttcaaatgatatgaaaaatttgtctgttactttctagcagacaaatgtgcagacattagaataaatatatacacaaaacaattttctcagatggtgactgatgcatctctaacacaccacatcacagacttcctgatcatcagaagagtaagttgttgaaaatacattgttctatggactctaaaataataaaaaagtgttattagagtgtttcttcatcagtaatatgaagaaaatttggagaagccagccttgttctgtaaatcgataaataattttacagaaaagcactcgataatatccttacatcttcctctctagattccttgagtcacataacaagaaaacacttggttatcatgaactcggtgtaaaaaaagtaaaagcaagttccaagatgcatgctaggatctgtgtattcagttcaagattttatttacatatacagtgtataatgttcagaatgattattcattgaaagaccttggatcatcacaaaaaatgtgatacacttttgaaagtcatcagctgagtcatgtcagaaatttccattataagagttaaacttaattctctttttttttttttgaacatgtgtcaaagatttatttaaaacccattaacgagggaaaagcaggatggtaaatctagttcaaagaagaacttgaaggaccaagaatatatagtcactgaaagaaagaatcctgagataagattcagaatggttaatgttctacagggcaataaaaccataaccttgaggttatcttttcttttttttattattcttatactttaagttctagggtacatgtgcacaacgtgcaggtttgttacatagttacacatgtgtcatgttgatttgctgaacccatcaacttgtcatttacattaggtatttctcctaatgctatccctcccccaaccctccaccccctgataggccccactgtgtgatgttccccgccctgtgtccatgcattctcattgttccactcccacctgtgagtgagaacgtgcagtgtttggttttctgtccttgtgatagtttgcttaggatgatggtttccagctccatccatgcccctgcaaaggatatggactcatccttttttatggctgcatagtattctatgatgtatatgtgccacattttcttaatccagtcaatcattgatggacatttgggtcagttccaagtctctgctgttgtgaatagtgccataataaacatatgtgtgcatgtgtctttatagtagcatgacttataatcctttggatatatacccagtaatgggattgctgggtcaaatggtatttctagttctagatccttgaggaattgccacactgtcttccacaatggttgaactaatttacacttccaccaacagtgtaaaagcattcctatttctccacatcctctccagcgtctgtttttttcctgactttttaatgatcatcattctaagtggcgtgagatggtatctcattatggttttgatttgcatttctctgatggccagtgatgatgagcattttttcatatgtctgttggctgcataaatgtcttcttttgagaagtgtctgttcatatcccttacccactttttgatggggttgtttttttcttgtaaatttgtttaagttctttgtagattctggatattagccctttgtcagatgggtagattgcaaaaattttctcccattctgtaggttgcctgttcactctgatgatagtttcttttgctgtgcagaaactctttagtttaattagatcccatttgtcaattttggcttttgttgctattgcttttggtgttttagacatgaagtctttgcccatgcctatatcctgaatggtattgcctaggttttcttctagggtttttgtggtgttaggtcttacatttaagtctttaatccatcttgagttaattttgtatatggtgtaaggaagggatcaataattctcttatcaaaaaaaccttcctctcctagccatgccaaataactgagcgctctgtgagccatccagctgtcagctagccaagtagcattttcacccactaatattagtctttaaaaagcaagaatcaaaagagaagtcaaggaatatcataaaatatctatgatcacaatggcaaacatcaggattttcaccaacatttatcaatgagaacagttctatacattagcattctgttcatctgtgaaaaaaaaactttttgatatctgaaggtcctcagaaccctttgagaattaaagagacttcaactgccagcaaattctacatcgggcatattctttaagacattgctgatctcacaagaggtagtgaaaactctccaaaacaacatcaatgaaacaaaatgaaacaaacataccctcagttccaagctgtgagctgcaggcacacttagcaggtcagggttttccccatgatagatgcccagagaggtacagtggtgagcattgccccaaaggcagatggctgtagcagttttctgagcaataagtgagaaggagctaagtgtagggcttctgaattaagccaggattctcaatagtgtctgaaatagtcataagtcagtaacacccctggctactgaattcctaattcagactttgtaggagtcccccagtttaaggtcaagaaactagttccaaataatatcagcaagcatgtgagaagctaaccatcttgaatgacattcatcatcaacaagaaaactgatacagactccctgctcttcccctacctggggaaagcagaaattgggattgcctgatacagaatataaaaaagctattatgaattatttaaaggaagagggcataggcttgcaacaataaactattaggaataaccaggatgatttgaaaaccaagtgaaaaaaaggtgaagcttctaaaagttaaaagtataattattgaaataaaaattcagtggaagggttagatagcttactggacacagcagaagaaaaacctgaaactgaaagagatatgcaaagaaattaccagaatgaaagcaacagtgtcttaaagaatatgccctatccaggatctgctggaatttgaaggcttttagttcttgaaggattcataggatctttgaatattaaagaggtatgtcttcttcactgatcaatggaagagtaaagtgcagaactgttctcactaatgaactttagtgagaaatgtttgtttttacttttgccagtgtaattatatattttcatgttattttgcttctgttctgatttttactttggcaatcaatattagtgagtaagtagtgagaagaagatggaaaataaaaaagaggcattcagaaatgtgaaggctagaataagaaagtctagtacttatctaactggagtccagtactgatgaacatgtgaagccgtaatgcataaacaacatatccaagaaggtaaatgaaaagaaattcatgcccaaacacactgcggttaaactgccgaatactaaagacaaatagagagtataaaagcaaccaaagagaaaaggtagatcaccttagaagtaaattgacaagagacttctcaacagcaaaatggaagcagaaggataatggaattcaaagtgttaagagaaaatgactgagtacttggtaatctctcaagaatgagagtgagccaggcgtagtggcacatgtgtgtaatctcaggcctttgggaggccaaggtgggtggatcacttgaggctgggagttcaagaccagcctggccaacttggtgaaaacccatctctaccaaaaatacaacaaaaaaaaagagccaggtatggtggtgcatgcctataatcccagctacccagaaggctgaggcccaagaatcgcttgaacctgagaggtgaaggttgcagtgagccgagatagcaccactgcactccagcctgagcaagagagcgagactctgtctcaaaacaaaaaacaaacaaaacaaaaagagtgaaatgaaatatctattggttgaataaacaaaaatactgaaaaagtacatttcaaggatagtaagccagagaagatatttgaacatctgtaacagacaacagattaatatctagcatattttttaaaaaagtctaaaattcagttttaaggaaaagacagttagaaactgggaagtgaaaagccagggacatacaaatcaagatttaaattcaattttatacatttcagattgtcaaaattaagaagtctgacagcaccaaatgtggaagagactacaattttcataaagcgcttgtggggagtgtacattggtagccactttggaaaacaatttggcattatcttgtaaaattttaatactcacacattgtacaacccagaaatgccacttaaacatatttacaggaatatttagagaaactcttctcataatagcaaaaaattgatatttcaaacgtccatctgcatacaaataggttaataaattatagtatagtcatacaatggaatactatataattatgaaaatgagtaaatcatagtctttcactaacaagaacttaaatgttagaaacctcataccaaattttaatagtgtcccagaaaactacatatagtataataccatttaataaagcctccaaacaagcaaaattaaatagtatattattttgttttacatagtatgtgataaagctgtattttcttcctttttttttttttttttttttgagacaatgtctcactctgtcacccagactggagtgcagtggtgcaatcataacttggcttactgcagttagacctcctgggctcatgtgatccttccatctcagccgccagagtagtagctgtgactacaggcgcatgccaccacacctgcctaaattttttgtatttttttatagagacaaggtttcaccttgttgcccaggctagtctcgaactcctggactcaagcgatcaatccgcctcagtctgtcaaagtgttgggattacaggtgtgagccaccacacccagcctatattttcttaaagatcaaggaaatgacaaacccaaaattgagaataatgattactttgtcaaacctatcgcctttgtaacatctcagtcacaattgggaatcacaaactaccagagatggaagtgctttctcattttatagttgaaaaaggtgaggcccagaaaggaagttacgtgacatctgtattaattccacaaattttaatttagcactatcataggcatttggattccatccaggggtataagagactattcctgccgctgaggaacttataattttaattgagcagtgagggaggggcagaaaataaacactaaaacaataataagtaaattctgtggtgtgttagaaagtcataagtgctattggaaaggagaaaaactggagcagagtaaagaagatcaagagttccagaagagaggtggggcagggacaggccacagtattaaataggttggcttagccccattgagaaggtgagatgcaaaacttgaaggcgatgaaggaaataggcaagtgtgtatttagagaaagctttcttcttgaggaaagaaagaagtcaagagtgatttcaaggattttggcttgagaaactggaaggatggcgttgcgtctgctgagatggagaaagccgcaagtgaagtgagtttgtaggggagggtcaggacttcaatttggacaggctggcttagagatggctattaattatttaaatgaagctgtcaagtaatcagaacatactcatccagagttctaaatggacgtttggagaaagtcaaaatgcatgtcaatgaccaaagcaatactaatgcagtgctttttgcaccaaacagggccagatacatttgaaagaattagcaattaagttttatgaagatgaacacaatagaaatgaataggaatatgatgaacccaaaaaatggagtcagaaaacacgtccagttcgatttttttcagctctttccaaagatgtaaatatagcagaatattcagttggcctcaaattgacatatttgccattttgagatagcagtcgattttgtgaggatttatctgattacttctcatgttattcccatagtctctttctgtctgtaagccacaacaatgatggggcacactttaaacaacataaataagtgaaacaaattctgcaggaaattatgcaacatagagaattccaaaaaaattatccacatgtggatttttattggccctgatcatgttttagaatgaaatgattataactttgccaggctgcttagcacaattacaaaggctggggcatgctgttggaatgatttgcagagagacttaactgattacacggtgttttatttgcattacattaaatccagagcacttcttagagcatgccgaaaaccaaatgtagagccaagatccaatgaaagccgcagctggatgtggtcagtgtctaagagctaaaaaagggacctggagatcctctggttctttattttatagcagagaacatttagttccagagaggttaagtgacttgtctaaagtcaccagtgacagaatcgtgtcaagaacctgccttttctgattcccaggccagtatacctttcgctgtaggttgctgcttccatgtgtcataaagacttaaaatttgcttcttttttatccctttgcagggtttcttccggagaacaatcagattgaagcttatctatgacagatgtgatcttaactgtcggatccacaaaaaaagtagaaataaatgtcagtactgtcggtttcagaaatgccttgcagtggggatgtctcataatggtaagtaaacagtcatcaccatatactttattattctcattatagctgccagaccagtggacactaaagccattgccaaaaatgtgtacagtttttccaccaaatgccagaatttagaatattgcatggcgataaaacatttctcttttaggtcagtgtttttaaagttttattatagaacctttctctctgtggttgggcatctgccatgaggagaaaagagacttgaaaaatctgggggattatgggaaaaactttagtgttagaacaaatataatgatcatcatgattaatttttatattgcctcatgcattaaaaacagaattaaaatttacttttgtgtatcagtagtgtcgttctgctttaaatgtaagaaaatcctgaagatgtctgggtctgaaactttaaatggcatatgagaatttagattcatttaattttttttttttttttttttttttgctgtttattatgcaaagacgagtattcgtttccttcacttcaaggaacgtccatgagttgtggaaagggtaaaacaaattatttttatagttctgcaaaacttcaaagccatagaaacataagagaataaaactttctacttttgaaacctgtgtctaaagtcaagcttatgactttgggtgtcaacttaagggaaatgatgtagaagacctgagaaaagacccatgttttcatgatctgtggaactaactcagtaaggtcctggaagacaaacgtgtttgaaaaaataattcttggtcactatttggttctgattggttgcctggctgacaaaataaattttaggtgtaacttgatagtattatatgtgtctagtattaatcagttattttcaatgcactcaaggaataaaaaatgccaacatgatcaaattaaatttgaagtttcatttcatcagctatcctattttttctttcttttgttttcatctctctcaaaactgatctagtaagaaggcagtcttcatctatatgtactctaaagcatctgagaaaattaaatttttgctctatcatgcagatacttggttttcacagtggaaaccatcaagatatttgagagtcactcattgattaataacctaccctttaaaaatagttcacaaaattctatctgtatgattactaatgggtcagttcctctaaaggcaagaatgtattttgaatagagctatcagcagtactgaacaggatggaaatttggtccaactttcctcaacaattgactacatctgctgtatacaactgtagtcatggattgcaaaataatttgctggttcagttccatcagtttcctttttatttcagacctcataaaacataagggcaagcttccaagtcaagggttgtattttaggtgatgcaatcaagttgcaataaacttatttcatcttcatgaagaaatcattgactttgaggtcattatcactgagacagcctaggaaagcatgccagttccgcttttaacactaatttttgcctattaaaaaattatcacttcacacattcatgtaaaatataattcctgttacttacaggcagtgcatacattgatgtaaaatatatttcctgttgcttacaggcattgcatacgtttacttaaaatcaatctgcaattgcttattgtttataggcaaatattatttaaaccccaacctatgtagtatggatggtataattttctcctcccataaatgtcaaagaaagctatcataaacttgataggtcatattttgacttcatatgacaatttattttatttctagagagggtcaatcttgatagggagtgtttgttcagttctagcaaaagcaagaaaatatatgaattaagtgtcatgacatcagagacttaggcagttcaacacttaaaaaattgcaaacataactaagaaaacctcagaggtttttatgggagtttgtttgctgcacagaaaataaacatcagactaacaacaaggttttgattagttttgcctgttagctgtatgaagaaaacatttctaaatacaaagttttctaggaagttgagtcactatttaaaatccattgctttgaccaatgtgaagccaacagggttttcattcatatagaatgcctttttatcaaaagaggctctgagtgttataccaaaatcagcacccagctgttttcagtatgcgcaagaaaacatgaacgtcccccaaagcaaatgtactccattccgtgttaaccttatttctgctccctggtctctgattagtctggttgatgaatgtagcttcccctttggccatgcactcacagctttgaaggaggcttctgaaggaactggtagggaaccctaggggctcttgctaatgttgttggatagtcactgaaatcagtgatcaccatgtcctttcactttgaaaattctatgattctgtataatcaaacaacctaactcactggatttttcacttttcaaccagctattccgtgtcttacagtgctctggtcttcacagataggtaggcacctggcatgtcagttgcctgaatttgaaagttttcacctgtatgttttggtacgataaaaataaaaatgtaatttatatatctgaatcaggtctgtatgttatgatcaattgctcagcaatttcgggcagttggtttgatggttatgtagtaatgtagcctgagagcagaaatacagagcctctgggctagagaaagtataaatggcatcctaggctatgtagggttacagctcttcagaaggaactttcattttcattgtgacacatcgtctacatgttgtagaagaacatagtttcagaattcttccagttagaaacatagtttctcaaatattcactttcagcattgggtagaaaaagtacccaggtgatggactgattgatatgcttcagaaatatgttttttcctgcaagtaatgaaaataaacacacgttcttaattattttggtcatttaacaacccatcatttctggaccatgggttaattccaccgattgctcagaagccttcctgagtcatctcaagcacaatcaattcactactgtgtctagacactgcccttagaggaaagctcaaaatgaaaatgaagcagaaatacagacccacttcctaggccactcagcggtgtatgtaacttaccaagtgatcattgcatcaactactctttgttagtgaagctggtgtctgcagaatcttgataaaaagactcatggataatgttgcttctttagtcaaatgggctcttgcatgcatttttatagattttcaaagtagtcatttttgttttaaaatcctgctgccaagtcctttatagtaattgcattttaaaaatatgtcttctttattttttattattatttttttttgagatggagtctcgctctgtcgcccagtctggagtacaatggtacaatcttggctcactgcaacctccgcctcccaggttcaagcaattctcctgccttagcctcctgagtagctgggattacaggtgcccgaaaccatacccagctgatttttgtatttttagtaaagatggggcttcaccatgttggccaagatggtctcgaactcctgacctcaggtgatccacccacctcagcctcccaaagtgctaggattacaggcgtgagctaccacactggccttgtcctctttatttttaataaaattatttagtcattaagaattttggcttgtgggccaggcatggtggctcatgcctataatcccagcactttgggaggccgaggtcagaggaccacttgagctgaggagttcgagaccagcctgggaaacatgacaagactccatatctactaaaactacaaaaaattagtcgggcgtgatggcttgtgcctgtggtttcagctactcgggagtctggagtgggaagatcgctttagcccagggggtggaagttgcagtgagccatgattgcaccactgcactccagtctgggtaacagagcaagacccagtctcaaaaaaaaaaaaaaaaaaagaattgtgactagtgaataattcatattcagagctctttttaatgtatgaactaaataataaaatagtaagtttaggctaagtgccctttttatttttaaaattttctgtatttattattactatttttagagatggagtctccctgtgttgcttaggctgggctcacctcagcatctggagttgctgaaactataggcatgtgccactgcacctgacctatttaagaaaataatctagagaagaattgacatgttatttatgaatcattcagttaggttttctctataacattgagatttggttaaaaatatgtttttcataaatttaaaaactattgaaatcttagctttgctgactaggatgtcttattatataaatgagagagagtttgtaattttttaaaaaaaactgacaactttcaaaatagtttctcagtggcttcataaaaatccagaaaaaaagatttcacaaatttttgtgacactcaacatttttaaggtagttctctcagtgccttgcaaacagcagctctagtgtatattgagaaaaggaaaaattctgaatggcaaatactagatttcaactttaacctattcctttttattattattattattattattattattattattattattattattattgagacaaagtctcgctctgttgcccaggctggagtgcagtggcgcgatctaggctcactgcaagctccacctcccggattcacaccattctcctgcctcaccctcctgagtagctgggactacaggcgcctgccaccatgcccggctaattttttgtatttttagtagagacggggtttcaccgtgttagccaggatggtcgcgatctcctgacctcatgatctgcccacctcagcctctcaaagtgctgggattacaggcgtgagccaccgcgtctggctaacctattccttttttttctttagtcttcttggttgtgtaaagaaaaattacccaaatcttaactttcagaaaaggtaacaaactcctaatgcatgtggcagtacatgtttgctccagctgccctgtccctctaccctgcgtggactccagaaccgcccatgttggagcccacctcctctccccacccctgcccactttccactcacacctcaggcaaaccctgcattttgctgttcctggaaaatggcttatgcttggatacctctgggcctctgttgatgcgtctgtctgttccttgtggaaattcttcctgacattcaaggctgcattcaaatgccttccttcccatgagacttttctgattccctgctcttccttttctatgtgtttcataccttcctgtgatatcacattctgccttaaaaagcaagagagtgatcagatacatattaccaaaaaaaaaaaaataccgatagcagtaaaaatgatagagaaaagactggaattgggaaatccatctgaagaccaatgcaatattaggaaataagacattgagaagggtgagaagaaaggaaattgagagaaatatcagagcagtgaccaatgaataaaagcgcctgaagggagagaagttgtcaaagattatttaggatatctaatttgggtgatagaatgaattaaccaagagaggaacacaggaataagagccagtttggaggagaaaattttaaattcagttttatattgtgttagagatgcctatagagtatccagcaactacgtatagaggaatataggaggatgtgaaaaataaggctccaaatttcagtgaagagagagcaggaatcatcagcacccattgtaggttagagaggtcacactagggaccacagaatacaagctaagggagaggcaccatcagagagatctggagagcagctggcagaatgttagaggacccagaacagcaggaaccaggacaagaaattttggaaataagagggcggagatggtcaccagaattaaaggctgggagaatactgaagagctcaagtctattgagaacttagaagaggccattagttctggccgagagaaaagcattcaggatttttacaaagttttggtaaatcccagtgagcgcaaagctagactgcagtagatcgagaagtgaatagaaagtgacaaacacagacggagtgaaaacaactctttcagtaagttcagtggtggaggaaagatagcttaaagaggaggtaatagtagagtcagaaccttcaacctgggcagaaaggccagagccagtacagagaggcacactagagaaagactcatctgtgtaatatacccagtctcccctaccagacatgtcctttccatcctttcccccagccccatctgtgcagcacagtgttgcatcaacgaagtgttcagtgaatgaattaaaggttgtcaggaagacttcagggaatcagagattgagttagaaggtgagctggtggtgttttgctcatcttcatttttgaaagaaacctaagaaaatgtttaaatgtcctctacaaatagtgtgaaaaatggtacctctgcataaaaataatttaatattagtgctaaagttgctccttgttttcctttagaggaactacaaaaggatagttattagattgccaaatcctgcagaacctccagcaggcacaagttggtttttctccctcaagaaagagaagtgagccaagcgtggtggtgcatgcctgtggtcccagctactcaggaggctgaggtaggagcttcccttgaacccaggtgttcaaggctgcagtgagccaagatcacactactgtgctccagcccaggcaagagaatgagaccctgtctctttaaaaaaaaaagaaagaaagaaagaaaagaaagagaaaggatggaagggaggaaggaaggaaggaagggagggagggagggaaaaaaggaaaaaggaagggaggaaaagaaggaaggaaagaaagagaggtgagccaggtgtagtggctcatacctgcaattccagcactttgggagactgaggcaggaggatcacttgggccaggagttttggcgagatcccatgtctaccaaaaaaaaaaaaaaaaaaaattagctgggcatggtcatgtgtgcctgtgggcccagccacttgggaggctgaggcagaatgattgcttgagcccagaaggttgcagtgagctacgatcatgccactacactcccacctgcgtgatcgagaaagaccctgtctctaaaaaaaaaaaaaaaattttaaagagagatgggaaaacaacttattggcaatagcacatgttcttgtttgtatgcaacaaacatataaaaagtagaaaaattgaccataagacatagccttactatttttcaaaagcctgataatgattgcaaattcatcccttagatgtggaaagacaaaaataagacttgtcttatttcattctgttattttctattgatttattattttgaaaacctgctttaattaaccttagtaattaagtagcatttgtctttaatgcttctacaattaggtagatgttttaaaaacatgccgattaattgtttcttagcgttatacccagatccaaaaagcaggacatctaactattccatgtgcttggtgtttgtgtgttcagcaatatcagtactaaatacacaatacaaatctataacatgctagtagtagctacattcagctcaatagaagtgtgttgtataaaggaatgccaatatgctttcccagaagttaatgagtctctatcaaacccagtcttcctgaagggagcctaccagctctgatatggataattttttttaccaagataccagatttctctgtaggtgatgaattattccaaataggaaactgcgtgccagtgttctggaagttgctctgtgtgacaggtgccagatctgtagaacagacagaatgtaattttttttgagcctcaaaaactagacaaatactgcttttaaaaagagagcagagcattttcttgagtactatgtagacatttgtagaactttagagctaaatttagagctagaggaaggaaactttagaatcttcttttctaagttcctcattcagtaaataaatcagttgaagaccagagaagttcagtaattttcttaaagccacatagctagtttgtcactgagctgaaactagaaattaagcttcctgactgcattcagtgcagtattcattcccttgctttccagagaggccaaaagttcttgctcagtgactcacagtaagacatgaagcattttccttttaagattaatcagcagtggtagaagatttggaaaaatacacttgtatatgagtacactcagcctttatagttctgacccccaatgcagaatgttcatcttctatttctaaggtctgacttcagtctttcaggaaacacctcccaacctccttcgctttcctcctcttggttgtcagattctccacatgaagggtagaacctaaggctcaagaattacttaactaaaaaacaccatctcacaaacaatttaaagatggaaagatagaaatagagataggcagacagatggacacatagattaggttttcagattctgttctttctctgtgggagaggtcagcgtgccatgactaccagcctggtctagaacccacagcagccatagttaccaagaccacagcaataaaagctgtgtttgttaagcattgccatgcacctagcactgtgttaaacacttcctgtgcctcctctcatcacctcacgtgaggtagataggtacaattatgtgggactcaaaagcaacgaaataataaaactggcttttttcccccttaaaaaaggtatgcgtgcctcagctgaaagacagaaaaaaaaaaaaaaagtaggcaaataaaaatccttgttttctgtacaatttcagatttgtgtatgttttatgggaatttagtctcaccaaatgggatcgatttttcattccttttatgaacttctggtgtataaaaatgttaaaatcacctatataattggttgcactggtagttaaatggaacctaatttgtagcatgggcatttaacaatacagataatttattcattagagttagcctttggggggaacttcaacttacaaaaatacgttttagtgagattatagcagagggatctcactttaatatatcctaattctaaaatggtttttcggggtattttttggttatatttgttaggtgatagaaaagcaagactagtaaatgtagtaagtggctatctttggctgtttgtccatttaaattaacttttttgattacccattaggaaaaaattgcttttctaggtgtgtaaagttttgcatatgattatagcctcttacctgtaaaaactgaatcagagcttagaaccatgcctggcgcacaatagtcattcaacaattattccttgaataaagagacagtattgtgtggtctgtgaaataacaaaagttcaggagcaacagacacttggtgattctagtcacctctattttgttataggataactggttttctctgagttttacaccagaatgccttcttcttttaatacgccttcttacttagtgcttttctcatgatcattttcccaaacttcctaatggacatagtgtctcattttctgtctgtttttaaacctgatactttggagtttaatccatcaaacatttattgttaacctactatgtgtattttgttacacctaggaacaaagatgagaaaacatgttactcatataatttatattcgagtagaataactgatataaaccaacatcatagtatagtaacagtttaatacatgagctaatgtatgcatacaacaggagcccagcatttaggaagctttttataaactgtcccaaaccccaggttttttatatactcctaattgagtggatggatggcccatcaaaatgtcccgtggaagacatataatgtcagaagttaccgagtgactctgataggctctgcctcccctaccctccgcactcctcaattaggaactactggtgaacaagaaatgaatgtagtacagccatccctccttattccctgggattggctccaggacccactcagataccaaaattcctaaatgtgcaagtctctgatataaaatggcatagtatttgcatgtaacctacacataccctcctgtatactttagatcatctctagatgacttataatatctaatacagtataaatactgtataaatagttcctatggccaggtgtcatggctcatgcctgtaatcccatctctttgggaggtggaggcaggaggatcccttgagcccaggagttcgagaccagcctgggcaacatggtgaaaccctgtctctacaaaaaaattaaaaattagccaggcgtggtggcacacacctgtagtcctagctacgcaggaggctgaggtgggagaatcgcttgaacccaggaggtcgaggctgcagtgagccatgattgtgccactgcactccagcctgggtgacagaacgagaccctgtctcaaaaaaaaaaaaaaagttgttatactgtatttttttatttgtcttattttttatcattgttttatttatttattttagagacagagtcttgctgtcacccaggctaaagtgtagtggctctatcacgactcactgcagcctcaaactcctgggctcaagggatccttccacctcagcctcctgagtagctgggattagaggcgcacaccaccacgcccagctatttatttttatttttatttttgtacagacagggtctctctatgttgcccaggctgctctcaaattcctggcctcaggcaatcctttcactttggcctcccaaagttctgggattacaggtgtgagctaccacacccagcccatattattttttattggttcttttttccaaatattttcaatccacagttggttgaatctgcagatgtggaacctgcgggtatggagggccaactgcataaggaattctatctgagcaaagtggtcaggaggtcacagaggattttgaaggaatatgctatctggggttttctttccattgtatttcaaaatacagtagacaaggacttaatatgtgccagaaattgtactaagtgctgaggatacaataatgaacaagattcctgcctttgtggagattatatggcaagggaggaaagaaaacattatagattaattcctgtgatcagtgctgtgagataaggtcatatcctgagggacccagacaagcctagcaccaggggctggggtcaccagtagataaaaatatgaacaaccataccccagccccatggaacaacacagaaagaaaatggggaagagtgagtagggaacaggatttttgaccaaaacctcctagtttaaaggtttctatatgaagaggccatgtaccaaggatatattcactaaaagtatctaaatataggctaattcaatttaaaggaatcccaactgagaggtaagattttcttcccctctaacacccaagtctggtctctaaggaggcccctaccaaacaatagttgtattagtcagcgataaaatttatttagggtcaatggaaatgaatttatgaatttgagactcaagggtacatgtcagtttcttcttgggaaaatccaaggtaatattcacagagtactcagatgggaaagttgtcgtgtgctgtcatgtctcatggtagaaatgctacccttagcataataacatataaaataactatctctggctgggcacagtggctcatgcctgtaaccccaacactttgggaggctgaggtgggtgaatcacttgaggtcaggagtttgagacccacctggacaacgtggtaaaaccctgtctctactaaaaatacaaaactgagccaggcatggtggcccaccccttgtaatcccagctactcagaggctgaggcaggagaatcgcttgaacccaggaggtggaggttgcagtgagctgggattgtgccactgcactccagcctgggcgacagagcaagactccatctcaaaatataaaataaaataaaataaaaatctctttgttctgggattcagcagagacagagtcttgctagagacataaacaaatatgacagtctctgcgctcgaggagcatatagtctagtgaagccgatcaccataaaaacgcatggctgtgataccacatcgtgagtgtaagaacagagctatgtatgcatggggaacagtggacatgatggccaggtacccttattatgggaaacatagaacccaaagtgtgttcccaaaggaacatgattcaaaataatattttgctgaacatattggtaagaaggaaagaaaacatatctgagttgaaaagttacagtttattttttccccaaactagtccccactaacccctcttacattttccttgttgcttttctttctttcattatcttctttgacacttcctcaccctacaggcagccagtttgtctttctgacaaacatcattaagtggtaactctggagagtcgggagataactatggcttctctccgctacatgtaaaagtgctctctggactagtaaaatgtgataaagcaccatccatatttctttttaacagagacaaacaaatcttataaactccctgagaacaaagcctatgtctgtacaactttgaattctgcacagtttcgtattttaattcgtgaaacgtgttgatccttctagtgcctgaccttaggtcaagtgctggggatacaaagaaggtgacctttgaattgggtcttgagggatgagtaggagttggttctcaattatttcacgtttaagtcgacatacttccctccctttgctaaactcgaattctttcactttctcagcaggagtatgcattaacttttaaaaatgaaagttaacggtttaatttttactgatggtctgtgctacttttgtgaaataaaaacatgagcaaagtggtagacagaaaccaggactcaagagcagtggaggaggagggcttctactgtgtgggaacgagggctgggagagcacagtgtgtgttcagagcagtagtaatccaatgattcatcctgtcattcctcttcctctatagccatcaggtttgggcggatgccacaggccgagaaggagaagctgttggcggagatctccagtgatatcgaccagctgaatccagagtccgctgacctccgggccctggcaaaacatttgtatgactcatacataaagtccttcccgctgaccaaagcaaaggcgagggcgatcttgacaggaaagacaacagacaaatcagttagttctcttctgctgtcttcattgggggaggcgggaagttgttttgggtttttgtttctttgagtaaatggtttactgcgctacaaatgcacacacagaatattgttcaactgttggctgttaacatattgcaggctgagtctgaaacgcaggaagtgttttcagatagcacaagtcaacattattttgaaaagggagaaaagtccataaagtttttgagaatagtgtaacaatgtattggtcatcctaactttaatgaatgaacttaagccccctgagcctatcaccctcttttaggatccatctcctttctcggcatcaaaataactggccacagcaatattcattcaagcagccttgctttcctctgggaagaacccgacctaggtttagaaaaggtattgaatcccactatttcacctttcaggagaactaccagagttacctctttttttttttttttttttttttttgagatgtcgtctcactttgtcgcccaggctggagtgcagtggcacaatctcggctcaccgcaacctccgcctcccaggttaaagcgattatcatgcctcagcatcccgagtagctgggattacaggtgtgcacgaccatgcctggctaatctttgtatttttagtagagacggggtttcaccttgttgatcaggctggtctagagttacctcttaagaagttcaacatgaggcataaaaatagattctagatattatgttacctttctttccttgtagcattcttgattattccggggcaactagaagctctatccttttattacatatgtgaattttatcttctgcaaggctctgagctgcctggactacttcagtggactctccaacatctgttcactcattgagcagcactgtttagaaaacccagaatgggttgtaattgttactgagttaggttttccaagcagcagagctcttctctgactggaaactgagaaaacaacatggaattatagaataaaattgtacctgaattctagtcccaattctgccatcagcttggatgacctggatcatgtctctgtacctcagtttgttgttgttgttgttgttgttgttttgagacagagtcttgctctgttgccaggctggaatgcagtggcgtgatctcggctcactgcaacctccacctccctggttcaagcaattctcctgcgtcagcctcccgagtagctgggattgcaggcgcatgccaccatgcccagctaatttttttgtatttttagtagagatgggttttcaccatgttggccaggatggtcttgatctcctgacctcgtgatctgcccgcctctgcctcccaaagtgctgggattacaggcatgagccaccgcgcccggctttgtagctcagtttttaatgacagggtttggctttgattctgatgtctgcacaacgctcccagggctgtaagaactgcagaacacactgagaagacaccgtcccagccatggaaagcccttctatgcagtcatttattttcacatgaacacctcccagagagctatgcaatgacttgatagatatgtgtaacttttcccctattcagatatattgttaggaaaatctcattaacctttcatgtattttgatgactatctcaagatggtagttcttctgtttagctaaactagtaagagtagaatcagttaatagaaaaaggaaacttatggcataaagccatatggtaataaggacaatgagttttctgatttgaaaataggtctttgatacctcaacaataatatacctggattcaattctttacagtataaaaaaaaccttgcacatttgttaggttcgagccacatgcacctgactactgctattattatcctctttattttagagatgaggaaaataaagtccagagaggttaaacattttgccctaagaccccacagcaagtgggtagaagacctgggactataatgcaggttttctggcctctagttcagagcattcgtagcatgctagcccctcagtagcatagtactttaggaagctagtctttcccacttgctggtagtaagccagggagacataatacactaagaaagcttcggtctgagaaaactttccatgattgttttttctcaatttttagaacagtaggaattcttcacctcatctgctatcccaacatattcacaattggaaaatttttgtgctgttctgttcttttcaaattacaaaagtccttgactaggactgctggcttttacatgcacaggactgcacaacactggtgtttataaagctcattcgttcaatgataaaattggccatagcaaatcaaaaataaatgaagacctctgcgtagctgattggactacagaaaataagccattcatatccaggaagaaaaaattaaaaggattgctgaaaaggaaagagccctaaagcaaactatctacagttttggttagttttcttttcttttcttttctttttttttttttttttttgaggtggggtcttgctttgttgcccaggtgggagtgtcttcttatattggtcaggctggccttgaactcggggctcaagccgtcctcccacctcagcctcccaaagagctggtattacaggtgtgagccaccagccatggttagttttcatcaactgctttctcaccttcttttcatcctctaattcatacctgcaatccttattagaaatcctgtcaacttaatagtaccagaaagtcaggcaaaagactgataaaaaaaaagcctcggtggtcaagaacttaaaattacactactggtgtgcaacgtgctcttatctgtgttactggaggacaccctcaagatacctcactccagttgactccttggctctaaatctttgagttaaaaaataaggaggttctttatggaataaacaggtattaagctatttaaaggagagggctgcgaaatgcttgattatgggcttttcaagttcagaggccaagcgtttgtcattttcttccagtaactaggactgtgtcttgcccctaatagttactcagactatatttgcttaattgaattaaacacagttgcctatgccctttgaaattctggactttcaacagagggcctctagcccaatatttgcttaccaaactggacatcattgatgatctggattcaggcagggtctggaaaaagagagactgggccaaattaaaataatccattcactgatgacacaaaactaaactacaattgtttggcaccctctcttctccttatcttgcaaaatcaaattaagcactagtggaaagaaacagttcagagaggaatatgggaaaggaaaaaaaaaaaccaaaatgtgatttccaacgagactagagatttgttctttatctacatggtcatgttactcatttgatagcatctatctcaggggtattatgttatctcttggccaggactcatgaaagttaagatttgcattgataggaaaagttttgcagaaatatggactcttgagagggtgggaggtatataaaagtggctatggctgtgcagcagagcaatttgcatttcttatacaccctgcttgagactgatgtcattagtgttggttaggccaaggctgggggaggctactcagaatagtgggtgaccaattacccagaacctttggaaaaggaaatgacttgattgaagaggccattctttaaatgtatcttactgctcaatttcaccattgcctattgtagaatgcgccctgcccgctcagcatttgcctctaggcagaccaggactccttcccctccccaactaatcttccttctcctgtatcttattccctagggccacttgcacctttcaaaatggataaattaaattcccctgctccccttctaccaactttaacatcatatccttggtgtatgatgccctacttttcattgttttgcctaaataagagtatgcttgggaattttaggcttagggctgggaaaagatgggatatggaatcgtcagctatagattgccggacaagaaattttaggagcagtagacctttcaaccgccctcaataggatggaactgactgtccccacaacctatttccctttcagtggcttgctccagccaaggccccttatttaagagatctttgtgcgctctgaaaaccatgcatatgccagaactaggtgctctgtttcatgaaggcagtttgataactgaatggactttggaagtgcccagtgtttgactattaccctggtgcgatgatcacactgggcgtatcattgtcacatgatcccatgtttgttgatgaaaataaacagtggttttcaaaaaccattttcagtgccatggtttgtcataaaacaataaatagaaaagcgcttgatgtacctgccaacttttcacccctatctaagagatggcgaagctccggctgcactctgtctgcaaataaggaataaaactttttatttgtgctatattggactttgggttccaaagcatcacattgtttatggtaggtacatgtggagtcactgtatttataattataagagcaaactggtgccattggaaaaaatggtctttctaaatagtgtgtgaaatatgaaactagtgaagaataaaatcaatatggaaatgtaaacttctatgaaaacatttccttacccatttaagtttgtgcattctgaaatttacaatggccatcaaacccagtgactcaaagctattggaaagatatctgtccttttaaatcctacacttacagctaaacaacgtatgggttcttttccctttatctctggaaaagcccgactgagctggaatttgctccccaaaggaaagacatcaggcagaatcctcagagaaaggggcttagggaccccagtagaaataaaatcaggatagtagtgccaattcatttctggggctgctggagaagttaggcttctgggatcattcatccatgtatcaatattaataaaataaattcttctattgccaggactgtcaggaatagctaaagatgtaaaagatctaaaccagtgtgttctttcagagaataagttaaaaataatattttatagagttaaaaagaaaagcacttggattttttttttccaatggctggactcagttggccaatacccttgtttgcctgctgagtaactctttggctggcaattgatttttttaagagctgtggttatgtgctagttcattagcatgtgaataattcttcatattaagttttcatttgtttgtcgtaaatctctaaaccctgcaggaaagcagaatatctttgacagctttcaaacttcacttctatcacacacagcactccaccagcacctctaggaaacagtggttcaaaaggccctgccccaagaccccagcatgttaagagcgttagtttaaaatctccagttcatcctagaacaatcattttaaaaggaaaaaaagaagtggggaagtcctatagaaagcaatggaaagggaaaagttctcaacccagaatcggggcttaggttctagttcctggtttgctataaatggcactttgactttggaatgtctctggcttccgtttatccattagtcagagaatgatgggacagattacttctgaagaccccttatgtcctataaatctcatagttctcaacaagagggaaacgggaacaacaggggcagaaaccaacgagaggctgaggaaaccaaaccaatgagttttggattgtagctaaccgaggagaaccaggtgtgtcaaaggtgatgaaagtcagatgtgtaaaaagcaagaaggaaacaaaatgaagaacatgagccctaagaattcagtgtctttccctggtaaaactaagaacatcaggaaagccacactcgatgaggcacacatttttccaagccagttttcactctgacagggttacctcaagtgattgtttgagagagggtagaggggttgactacactcattcaatctgccaaattagaaaagtcacccagaataccctgtgctttttgagtgattttcatgtttatctcccgtagcttgctattttgttattcaaaaggagtgtaaacttagggcattcatgtataatacctttcataactcatgttaaaatgctgatgttattggatttctcaggaacactactgttctatttctccattcaaaaaggtaaaaaaaaaattaattactctattttcatcattaatcccatttcccccattgtctttgtattctacataggaagcatgccatagatctataattgaatttactcatctatataaaacagtacttttaatcccatcctgaaaatcaaaatatatttttgaaaatcaaaatatgtcaaaattgaaaatcaaaatgtcaaaatattgaaaattgaaatatatcaaaattaattatatttgatgtatccctcaaaaaattgatttctccttacagaaatcattttgctttcctggaaaaacactgggttcaagtgcagctttcttcattccgttctggtctgtccagtatatgaaaagcacaagcacacaatgaccagtgacagattcaccatgaagctaatgaagcttcatggggcccttcccttgtgcagaagtccttccagtgcttggggaagggccgaagcaattttattctcataatttgtaatattttccttagagagactccactactgtgtatattttatgccccacaaaacctgaattcaccccatcatgtcccatttgtaattaagctttctttcctgttaaggagggacgcttacccagccctttgatgtacggtctgaagataaatacactgttagcccccaactagaagtgtaaaatcattaagacaaaatttgagaatgatacggctcctataatggcaatctttggatgatactgtccaagctgatggaaagtgtaaggactccactttgctttgtaaaaaatacaaaaaaacagccatggaagtgcagtacattttgtatggaacattgtaccacattgtaccaaatgtcatgttaaattaatgattcaagataaaatgcagaccaaatttgaccagggttttaagaggttctctctccataaagcaggctggccacgatcttctcactaggtttgagggtaaggaggtcccctgtgaaatatgaaagtgaactctctgctatctaagaattggtgaattggttgcaaagaaaggcagaccaggcccacccagggatcactcttgcagtttgacagatctacctggaggctgaaagaatctatgcagccttcggaaatgcagtgaaaacagtataatcagatatgactagggaaaaaataaaacaactggtgttcatttgcatgtcaacacccagaattctctgctagttcacctcttcttcagaatgcagaaaggattgaaaaagctggaatggggccgggcatggtggctcatgcctgtaatcccatcactttgtgaggcagaggtgggtggatcacctgaggccaggagttcaagaccagcctggccaacatggtgaaaccccgtctatactaaaaaataaaaaaatttaaaaaaaattgccgggcgtggtggtgggtgcctgtaatcccagctactctggaggctgaggagaatcacttgaacccaggaggtggaggttgcagtgagcctagattgcgccattgcactccagcctgggcaacaggagcaaaactccatctcaaaaaaaaaaaaaaaaaaaaatgaaatggtttggcatgatggtggggtgctgattcctctctctgtccttgagtatttactgccaggaaatcctgaccaacatcaattgccaaggggttaaagtcacattgttgttaaattgggagagaaaattagcaggattttgtgccctatgttcaactattacagagtttcaaaaacaggaacctggagctttatatgaggggacaggggaagtaaaggggaagagtgacaagggtgatttatcagggcatagttccagataaatcacttacatggaggtgaaagaatttcatgcatatgttctgtgccaagaagccaaatggttgagcagaagctctgaaagttgaagtgggcagttctgggtacagtctttccacatgtgaaaaggtgatgattttatattcatgttatttgtactcctgcatgtgcagttggtcttttcaggtgtccagatcatcattttctcatgacatgaaagaaagccaataaaggctagttgtggtggctcacacctgtaatcctagcacgcacttagggaggccaaagcaggacgatcacttgagcccaggagttcaagaccagcccaggcaacatacatagcaagacctcatctcaaaaaatgaaataatttttttttagaaaaagaaagtaaatatttcattaatataaattataatacactgtaaaatgcctggaggacaagaaacacgttttctctaggttctgtgaaagcatcattatccattcacatttttctcataattagaacctgacgttctggaaaaatacagtaaattttcatcgatgttacttgctctgccccccttgtattcctcccattaataatattaatcctgaaaagaaaaaaagaaaaaggaaagaaaccacccaagcaaaatgtttaagaaatacggtaaggacagtttggtcccaatttccttaaaaattagagccaccaagtaaacctgtttgggggtcctcacatctgtcctcttttggagtttgctaagtagtacagttgaagtgaattttttggtaacaaaagtaaaaacttccagaataactccagtaaagggtgttgatgtgacgtacaagtttggaaatatatttaatatctgagactcctcaatgttggtgttatttcctccagtttagaacaaacttaatcttttgatgaaaatcatagagttccatagatatgaatagaatctccaaccagtgcatcttgaagccggctgccacggccactcatgcaccttctctcctttcaggagagaattgtcagcatctctgctcaaaacaatctttacttttagtccatcagagacttcatgtttgtcgtgcatgcacactcacacctctccacacatatgcccactccccacacacatcctgcttctgagaaatgcaactagaatttcctccggagaagagatggaaacccctgattgagaaatttaaggcctaggaaaggtaaatgacttttcttaagtcacatggctcaccacagaaccaaagctggaacacacataccctcagctcttcttccagtgctttcaggtatacaagtatttgaacaggattcaaggtttaactccttatgtgtcattcagtgtatccagtgtaagtaaaatgttaccccttagtcagaacagccttgagaatttctcaatgactacaaaccttgcttagttctatacaagggaagtaaaagagagagaatgtcatgaccaaatgacttaacttttgaaggcagcctattgcaaacttgaataattggggcatgtattttattgattgtttgacctataaggacagatattttaaaatataaattcaaaattgcttttttgcagcattcacctgtaggccttctatatctgctctttgtgaaatagatggcttccagagcattaaaaaaagaaatagacattttcttggttcaagagctgtaatctgctttccgagtgatttttcatagttaagcatattttatgtgcacatagtttcatttgagatctgagaggatttcatctaaaacggaaaagttattacctgtgaaggagaacaaaggaaaaggaaaaagaaattttaagaaaaaaaaatttttttaaacctgtagttactttatgttcaagtgggtattttcaacgctgagttgctgaaatggttttttattgaaagaaggttaaaagtgtatttcattgaaagccaagataaacagtagattttgtatcattttaaaaatcaacaatcggccgggtgtggtggctcatgcctgtaatcccagccctttgggaggccaaggcaggcagatcacttgaggccaggagttcaagaccagcctggccaacatggtgaaaccccatctctactaaaaatacaaaaatcagctgggtgtggcagtgcatgccagtaatcccagctacccaggaggctgaggcacaagaattgcttgaacctgggaggtggaggttgcagtgagccctgattgtgccactgtaattcagtctgggcgcagagtgagactctgtctcaaaaacaaacaaacaaataatataaaaatcaacaatgaagactccccaaacaaaagaaatcaggattcttagccagtcataggtaaagtgttacagtgtaaattgaagggaaagaagaccaaaattggtgaaatatgtttggtcccagaagataattaagatgaataaaagaacttgagagtattttctcattattaagcatcttcagctttaaagattttagttagcaaagcaagtttacataaacagttttctgaacctgggatggcattcactgtgagttagaaatctccaagtcatccacgttttccctgttttatttgcagccattcgttatctatgacatgaattccttaatgatgggagaagataaaatcaagttcaaacacatcacccccctgcaggagcagagcaaagaggtggccatccgcatctttcagggctgccagtttcgctccgtggaggctgtgcaggagatcacagagtatgccaaaagcattcctggttttgtaaatcttgacttgaacgaccaagtaactctcctcaaatatggagtccacgagatcatttacacaatgctggcctccttgatgaataaagatggggttctcatatccgagggccaaggcttcatgacaagggagtttctaaagagcctgcgaaagccttttggtgactttatggagcccaagtttgagtttgctgtgaagttcaatgcactggaattagatgacagcgacttggcaatatttattgctgtcattattctcagtggaggtaagatttgtcttttgatcttctatgaaagagggtgggatgatggtggggtggccaaaagaattttggatttccttagtgttagtctgcattgtcactttaagtgccagtggcatgatgccatgaatcatcactacacgtgcaaaacactgtaccaagaaagagtgtcataggtttgcggtgtgaaggttataagtaacccaggatcttctctttcatccctcaacaatatattttttccagtcaaatgccctcttctcctttttctttttcttttcttttctttgtctctttcttttccttccagaaaggaagattagaggccagtctaatctttggttcctgtaagtaatggcatgtataactttgcttaagacaatgctcacttgatgtagagaagggaccactaagtatttctggtcaaatcatgctcctgccccaccatcagtaagatactactttgaattgcttttgtgatatcaggaattaaggaatacctactgacctccacccactctcttgtgtggattcctctgatggcttcccttaaagtacctttgtgaggtagttggttgtgattaagaatgcaatgtgaaccgaacacacaacatagaaataaatttagttatttagcaatttgttgtatttttggccctgcaagtagtacatgatctgactaaccaattccaaaagccagattttcttctgagtgtgacttttttcttttttttttcttttttttttttcctttttttttttttttttttttttgtgagacagggcctcactctgtcacccagactgaagtgcagttgcacagtcatagctcactgcagcttctaactgcagttagtaagctatgatcatgctacttcataaaagtaatacgtggccattttacagttgggctcaagtgattctcccacctcagcctcccaagtagacaggacaacagctgcacaccaacatgccctgctaattttaaaaatttttttgtagagatgaggtctcattatgttgcccaggctgatctcagattcctgacctcaagcaatcttctcaccttggtctcccaaagcgctgggattataggcataagccaccacgcacaatctaaacattactttcattagcctctcatgagtagaagaaagttttactttcatctctctgtataaaaattgtttttaagtggcaagttttcctattgaagtggactttaggtgagctttttgtatgtactctacagtgtatcctctgtgaaaaacccgtcgggggatagtggtaaactgtatataactgcacaatgtattataaagagcacgatccctttgtcatcttttgttgtccagttgaaaggagaatgtttctgaaatcaggtgcatagtgcagtagtcataagaatagcaaacatttatttaatacttgctgtgtgccaggcagtgttctaagcacttcatgcatatttattcaatcctcacaacaattcagggaagtaaggaccattttacaaatgaggaaaccaaagcactgagaggttttctcatttgcgcaaggttacgtggctagcaaaagatggagacaggattgtgagccaggcatgctggctcagactctacactctctaccatcacatcatgcggaataccggcctttaaatgcctagggtgcaaatagatcacagtatggcatagtttacctttggagctgtgaagtccagggtcaagtcgtgattcactttaaaataactacttgatattgtgggtttttgttgttgttgttgtttgttttttgtttttttgtttttgaggcgaagtctcactcttgttgcccaggctggagtgcaatggcacaatctcggctcactgcaatctccacctcccgggttcaagggattctcctgtctcagcctcccgagtagctgggattacaggcacatgccaccacactcggctaatttttgtatttttagtagagacggggtttcatcatattggtcaggctggtctcgaactcctgacctcaggtgatccgcctgcctcggcctcccaaagtgctgggattataagcatgagccaccatgcccggccgacgttatgtttaatagaacaaaaatatactacctggcatggtttaatatcttgaccaaatttacttcctaaattaatccctggctgtctggtatctttgattaattcagcaaaaaaggatgagattccagtatataagaggtttgccagaagaaaaatattaaattttgaaaaaccagattagaaaaacagttgatattatttatctagtattttattttacttcattttattttattttattttttgagatggagtctcgttctgtcttgcagtggtgcgatctcggctcactacaaccgggttttccgcctcccgggttcaagtgactctcctgcctcagcctccctagtagctgggattacaggaatgtaccactacacccagctaatttttgcatttttactagagacagggtttcacaatgttggccagtctggtctcaaactcctgacctcatgatccacctgcctcagcctcacaaagtgctgggattacaggcatgagccactgcacccagactatttatctactattttaaggcacattttatttttaataaaatttgaaaatatattaatatttaatttatttcaaatatttttcctaagcatactatatatcccatgtctattcttttcacttagtcaatttcccatgtcattacatactctttgttaatagtttttgttaactttttaaataaaagtattacatggtcattttataattgagagtacagaaaggtataagtgaaaagtaaagggctttgccctcaggataaaatagaattaacaaagtcctatttttcctatcaagaagtttacatgcacactcatgtagatagatacatacatacacatatgtgtacgttcatagcagtttgtattcctacccacatatacgaagggaagcatttgaaatgagccattcaaaggtacttagtttctactaggcaaggtctagacaagaaacagtcatgagaattctgggctttatgaagtgagatctgaatctcaggcatctatcgaggatgagatccacctccccgattgtgcttccttagagtaagacaaaatttctcaattagtttttcctcctattccagattttccattcagctaagcaggaggctttcatccactaaacaaatttctgatcctacccagtcttaacaagagtgattgttttctcctctgcaatttattcgaaagtctatcagttactttggtggtttcagaaagaagtgcttttgttggggatccagttggcctcattctgagctggctgtggattcacagaagaacttcacttcagcaaaggctcttagggccccagactaaaagaaagatgagcaagatgtgcgtcatctaagagtgggcgggggtaaggaattggggattaatgggggtgtccctagaggacccaaagaggagatttttagatgaaagtaactgatttgacccaactcagtatttgctggggaaactggagttgctacctaagattgctgccattgaacttcagccttaaaaactgctgataccatttgattggtacttagatttgcctgggcttagcgtctctgctgttcactcagctctcaaaccaagctgctgagaaagatgacctagttcttctcgagtctttctcctctctctctttctcccctgagcttgggggcaagaattagactaaatgaaaggaacagcaacctattctagaaccaaagttcaggacttggtacctttttaagggcatttcatgttcattctctcattccatcctgacagcgctcctgggcttttaattctcatttcacagaaagaaaagtgagggtcgtaaacttaagtgatttgtctgagatctgacaaactagtgccaccgtggaactaacactgaaacctgggtgtcctaactgtcccctctggccctggccagtggactgtggtcagcacactcactcttgtgttggtggctgcaacctgttctctattcactatatccctaaggtaggcccatacctagaagccaggaacagcgcttccttggtcatcatggtaaacaataacttcccttgcactccctagtcttactgacaggctgggcggtgtcaagagtaataaaactgcctccagcaaagccatgtttgcaactggcgccgcagcatcatgccagccaccctagcaaactcccaaaacctacccagcagccaaagccaagcgtaaagctcagtgaagctgacaagccccaggacactctggtggatgttttgcccccttgagtgtttgctgttttgtgaagaaaaagtgtaggagagttccagctggaactctgcagcaggcaaaagctctttttgttaattcaaaacagtttggaatccatttcagttcttcctaaacctccaagatacgggggaggaaattcactggattttacaatatatttttcaaggcaaattgccatcgccgtcctaatgacagagaagctgccgatatcactacaacggctgcagatggcaagtcatccagcctcctcctgtgccctcctgagtctggcttggtgacgcaaaccacctcaagggcagctccttctttttccagcagtcccagcactgttccttctctgtgaagccactttggatggctattcttggcatgatcatagacttttctgctgttgagtgggcaaggagaatagggtagaagcaggggaattgttctcattgctatgcatttatagatcaaagaggagcagatattttatgttaattggataacacctagttctatcaggtcagtaacctggggtccctggggctcccccatgggtcataccagatagatagattttttaaaaatttgttggaattaaagtagaatcaaagcctagtgctagcccagaataagttattcaataaatgcttgttgagtgaataatcatccgaaatgattataatactgcctaccattcgttgaaagcttcagtatgtgggagaatctgtcctgggcactttatatacacccataatctgtttggatttcttggtaggaagactacatggctgcatacatggtctttcattacctccattttatagatggagaaaatggaaatttaaagaggttaagcagtttgccgaaggtcacagagctactaatcggtgaggtcaaggttcagacccaggtctctcagactttaaaactggtgcacttaaccattagactctactttttgcgtattgagatgtggaagcatctcaattaattgcttcagtcttggagttctttggcggttatcaaaaactgcctatttccatattgcctccagatattgtaattaagaatttccaaggccaggcacagtggcttatatctgtaatcccaacattttgggaaaccaaagttggaagatcccttgagcccagaagtttgagaccagcctgggcaacatagggaggcttcgtctctacaaaaaatacaaaaattagccaggtgtggtggcgcatgcatgtgtagtccaagctactctggaggctgaggcaggaggattgcttaagcccaggaatttgaggctccagtgagctgtgattgtgccactgcactccagcctgggcaacagagtgagatcctgtctcaaaaaaaaaaaagaaaagaaaaagaaaaaagaatctccagattatagttcagatattacgtattaatatccaaagccctccttaagacaccattttaatctgtctaacaaaattaacaccctaggttttgacaattgcttgaggagggagtagggcctggtgatagagctaaagactagtgttctggttctttaatttgttcagccagcaggtacctggaaataatgatactgtttgcagaactccccacaaaaatggacagtcaactttaaataactaagtaaacacatctctgcttaatcagataccatcttatactaggttctaatatagataagtggttgcagaaacatttatgagaggaatgttaaattgtcgaaataccatccagtcccttcatttcttcctgcccttcagaaacaaacagaataaccctgatgcagctgtcacggcagaacactcattccagctcacagaacaccagtgttcaatcagcactgagtttgaggagcaccgggtttgggagtattcatctctcttccctgtcccatagctgcccttcaaactcttgagactgttcccagctctaaaatggaaagggtcgtcttctctctggaacaaaagacaggatgtacttgcttgaataggccagtgctttcctggaggaaactccggcttatggagcctctgcttctgcacagcccagtgccttccaccccctcttcatctgctagcatctacattactagttaactggagaggagaccaaacccaaaatattacaaaacatagatattaaaaatactgtgaacaacaatcagcccgctttctcccacctctcctgtaccagctaaatatttacctccctcatccgtagagggtttttggacaagacaggctggtgcctacatggtgaaagttgtttttctctcttttcttgtaatattgcaaataaacaaggatatctgctttctcttgagcaggacaacagccaaagagtattattgcatagttcctgtcccctatctgggctacgattgtgtctgagagtaatagcacttatttattaactggaagaaattttacaggcacctatgttgtttctgcctagcttctgaggctcctctcttaggccactcctctcaccatgcccccacagctagttggtaaaatggctttgaataatgactcgctttgagttatctagaaatgtcccattagttcactattttcataaccccatagacttggtttgacaagggtgaggtttatttatgagttctcaactggcacccaatttttaaaaaccacagagctgggggcggggatagaatgatggggaggagatgaaacatcctagaatcatctgatatactttaaacatatacatatacaggcttttgttgtttgtaaaatatagaagcatctttatctgtgactggttgagaaataaaatcccttccccagcccaggcatggtaggttgggatcatcccagtgagcgagcaagcaattggatttgccctcagagactgactatggggtcgaatgctgagtcattcctgtccccacaccagcagtcctggaagaggctcagtcgatcagtcagtgggctgctttctggagcactttatcattttgggctctcacaatgtgtgtttaaactctgagtgaccccaggcagccttccagactggcacagttcaccaagacgttcagacagatcatctgcaagtgaggaagaatgaaaacccagcactggttcaaatcactcctagcagaggtagtgaaggcatcactcagtcctggagaaatcttcggagggctcaccagcgtcacaagtaggtagaccagaagaggcaggctggcccattgcaaagccctggaatcagagggacaggagttccaaatccccactctctctcttcctagatgtgtgcttgcggcaattatttatctctctgagccttaatttccttatcaggaccctgagcaaaccaaataacatgatgtgaagcctctggcacaatgcctgggacatgttcagcacacaataaatgctaattttcccttttgccctatatgatatgatttgaagcagcgccactcaatcctgccagtcacattgctggaaatgccaccaacagtcattcttaagatcgcttattacaatataaatacccctaggggatatcagctaatcgctttatcaactatcgctttaaggggattaggtgtggattgagaacaaaacccagaaggaaagagatcctggaggaaggggagggcttggaagtggggaggattcggacgtcctgtggcccccgaaggagacggggaatggcaggtctgctggattcccagccttcaggaattcccatgaacttcttggggacttcatgtgtttagaccatatttagagagcgtgcatgtgttttgagatcacaggtttttctgagagacattgggaaggaggacagcgggggagtggagtggagagaagtcatacctggcagcttttaacttcacttactgcccttcatgtgctgttgccatttccagaagttgagggagtaaggaagggtaggagttcttggtattcccttatctcttcctttccctccccttatcctgcccagagcatcgcagggtagagccaccagacggattcagggcatggagatggcaggttagtggtagacttggaagggatcgttcttcctatttcagcaccacccttcttcctctacctcccaccctgcatttccagccccagtcagattccttcttggacagagaaggagcagaaatgtacgtacatcactaggcttaaggggggactgcagatggctcccctggtcctgacaaaaaggtggggagcaaaccgcatggctggacgtaaattgagtgacctggaatgactagaacgacagggggcctctaaccccagggtgcacagaggtagggacccaagggctttccggggtcggacagaaatctcgggttccattttcactctgagagacccagaaatgacagagcccatgctcagtttccactggtggtgctgttgagtggaggggctttgaacatggcacacaggaaagggttgcccaccctgtcaccagatgggcttgcactgttttgtggtttgggagttgcatattggaggtgggagtggagtgttgagatgaggcaagttgagatgtaatcgctatttaatgggcagatcaaagaaaacattggctggtttgatttttattatggttatcccgctccaccatcctggcccagtcatatatattattgttatcaggcatagataggggaagcaattaaatgtgaaactgttatttaaaccggcaagtgtcagaatgttaacccacttcagagcgaaggctctaccagcaacatgtgtgttcactgcagaatgtgctggttacagatgatctttatctgtttgtcaaagcatttgcaagatctctattttatgtcatcccctttccctgaaagcagcagcagtaaacgacattgctcctcaaatcatccatggctcagacctctgattaatttaagctggccctgctagcgttcttataaatccccagcaagatgcaggcccaggagtggaaaggggaaaacatccggaaagcagcggggggcagggagggggaaggctgaagggaaaagaaaaaggctgaagggagcaataattgaggaagaaagaataggaaaaatgtagaaaggacccaagaaaatcagagaaatgagaggaaaagaaaggtaagaagaaaatgaggcaagtttacagagcagtaatgaaaatagtaatagctaatttactgtacaacagacactgtgctaagcactttccgtatgtccctcagtcctctgaccaacactatgagttaaattaccgctacagctccaattgttaaagtgaggaaactgaagtatagaaaggttaaggaacttgcccaaggttacctagcttgcaaagttgtaattccaactgcgtctcactcagctggcagtgtgcacccttggccacacattagaatcacccaagagctattaaaaatcctgaaggtcataccccaggcaagtgaatcagaatctctagggatgggtcccaggcattcgtttgcttttttagtctccccagataattttaatatgtagccaaaattgataatccctgcactagaccaagctccgattcaaatttaaatattaagaggacacatgtataactttgctgaataattttttcctatcggtaggatggtgggaaggaattgctataggccacaccatgatactttgctgaattggatcagaaaagtaccctcaaattcccagcatcatttcttcaaggaagtagtgaattggggcaccgtgggttttttgttttgttattgttcttaaaccaccttgcctatgtgcactcaactacaggaacgagaacttgcctgaaaccccaaacgtgtctgcatcaggcattatttttcttgagctcctgaatttctgctctaaccaagaacaactcaaaaaccttcaatttcataactgttgatatgccacccactcctacttacactcctgaccccaaccccatggaaactgcctttattcgaacaaacacaagaattataatatgttctaaagttcctctacctatttcattctcaccatacgcttatgaaagaaatgtcattgtcttgaaaactaagcctaaacccagaaagattagatgatttgtccacaggcacacagaaactaagtggaagagaaacaggactcaagtcttcagtttcccaatccactgcctcctagaacatgcctgtgaactgagggagcagtgcaataaaggaaacttgagaggaagcgcaaaaggaacttaaattgcaaagtactgggttccctaagtagccctgcctcccctccagttttcagcccacacctgaactaaggtctttcattgtctgtggatcaatttacagctgccctgcaatcacatttgttttgtttgtttgtttgttttggttttgaacgccctagggacagtcggtttcagattagtctctatcagagagccaatagggaaagatgcagaaagccaggagagcagctcctagaatagagacaaaaccacctgcattttttctgcctcttcttcaggagactccactgtggtcatctggttccctaattgagacacctcctgagaaaatctgtgctagggaaacacccagcccaggtgggcagatctcaagaggaccagaacgtttgaatctgcttcagataaaccctccacttaacagtaccagatctggacgagatggaagctttgtagatttgcccataatccacagtgctctgtaatcaattccaggaccgtgtggatggagaccggaaaggtttctttcccaattcttcacagcctggggagtagggaactagtaattgactccagcctcctcgagtgctaagtcctggagtctgagtcacacacacttcccaaaagggccttctaagcagcctaccccagcagagaggacccttggccctggccctactccagactcaactgtaacctcagcaaggtgcagggagaggatctcaggtgggcctcctggcaacagtgccttttcaggcactaggctgttgggaatggagagagaagagaaaggccctggcactgtctgggtatttggatggatttctgtggcacaactgtggcacctggcttagctcagtaaaggactgagtgtgcgtggagcagaaaggggaaagagactagtggggagctggtgaccagttggagggtggagggtagggaacaaccctggcagatccattttgcccttgactagagcttaaagaccaaaggaagcgttcttgtttttaagtaagtcaggtgttctaagtttaatgttaatatgctttttcaattagatgtttgagtatatttccccagttgaattatgtagagggaattacaaatgagaatacatcttacaatttttgaattagaatctttgagattatctatttagtccggtctgttttgtttagacaagaaaattgagcccattgatcttaatcagtttgcccaaggtcacagagctggtgagtgaaagctttagatgtagaatatgcaacttttctctgctgccctccttccctaaaccatcttgccttaacggaggctcagtcagggggacaatgggactgatctgtaaatgatctaacttgtcattgcagaaaatatacttactccgtggccacaaaatttcagcccttcagccaagcttcatccatcacatcataaagaataacttgccaaagaggggtttgaaaatccaaaccagatccctctccactcctagagaggccagttccatgacactgcaccggagccaagtgtttccagcaagccctgatcagttgcatgttagtccttgtttgtatgataaacgggacctagtagattaacatcatctcctcagcccaagggctgaccccagtggtgctgctcaagaggaaggaggaggctgggagcggtggctcccgcttgtcatcccagcactttgaggggctgaggagggcaaatctcttgagcccagcattcaagagcagcctggaaaatgtagagattctgtctctaccaaaaaaaaaaaaaaaaaaaaagaagcaggtggaggaaggaggagctgcagaaaggctccgggagccagtgtctagtaagcagaggcctagcccaggctgagtggtcccagcccaggagggcctctctcggcacctgtctttagatgcacgtctgcctctggcctttgagatgcacacattcatcaagcaggaggatctgtagtcattaaaccaaggtgccagtctggggcccagccttcaatgaagcatcagtggctttttcattcccatagagcaactgcgaggaagaccccatgctcccaggggcccaattctccaggccaggaccagatcatttgttccttctcagaatctgagatcttttgctgatggttccaaaattgaatgctgaaatctaaaaagaaaattatacttactctggtcaatgggatatgttggagacctgagagtgaaaaaatcaaactgaagaccagtttccttctttaatggaagaaaagtaagaaagttaacttagaagaatatttagagttctgaaaatcccactctgagaccactctgccatctcacattgttctcttgagccttatctcaatggataaaggtcactagagtttattagacacaggaaaacatcgtttacagacttcttcattgtgtagggattctgccttcaggcctgttcaccagccaggagaattgtgctttttgatccagggctcttggccagaacagccttctcgctcattaactcagtcaaccaaatgcttcctgtgtttccactggtggttcagaacgtagtctctgccctctgatacctcacggtctaacgggggagaaacaagaaagtcagaacttacaatacaagataataaggaataagagcagagcctttggaaccagacagacttagatccaaatgtcagctctgcatttactagcaagtggtctatcttggtaagatgcaactcttttctctaagtcttaatttctccctctgtaaagtatgacctcatggggttattgtgaagattaaatggcatatcgtatataaggcccttggcacgatctttggaaaataataaccattcagtgaatgtaatctactagtatagtagcgattgaggtgtttatagggtgctatgagggcccagagaaaggagatgagatgaacaggagagaggaagggatactgttgaggaaggatttcaggatggaatcccaccacaggctgtattttgaagaaatggttgaagtcaataagaagagtgaagggaaggtgagaatgtttcaggcaggaagaataaaatctgaataagtgcagagtcctgacagaacatagggtgtttgaggaacttggtatggaaatagattaatatggcttaacatggagcaaaatgaaacagaactgagactagaggatgaccaggaccaggtcatgaaggacattaaaggtgggtaaaactcataccatgaaggagagaagagttacagtttttaaaagaaaataaatagccttcaggagctcaaatttgaaatcaatacgagatagatgatcaagtgaatgttctgtcttcttgatgagcctgactgagaaaaccttataatctaacccaaggcaacaaactgagaaattagaaaataaaacttagagattagaaaacaaaaactgaaacccaaactttttacttggaaatttaaaaacatgcttctatataactcttaggttaaaaatgaaatcaaaattgtaagacaagctgtttagaaaagaactatgagagtaccgtttatcaaagcccatgggatgaaaccaaagtggcactaagaagaaaatgtggaggcttcaatgcatttattagaatacaaagaataccaaatcaaatgaattaagcattcaactcaagaaaactagaaaaagagaagaaagtaaacctaaagaaagttttaaaaaggaattcaataaattaaaaacaaaacacacaatttttaaaaacagacttgattaataaaaccaaaagctatgtcttttttaaaaaagcaaaaaatagataaacctttgacaaatcagatttttttaatgagagaatgcacaaataaagagctctaagagctgggcatggtgactcatgcctatattcccagcactttgggaggctgaggcaggaggattggttgaggccaggagtttaagaccagcctgggctacgtagcaagaccccacctctacaaaaaatttcgaaattagttgggtgtggcggctcatgcctatagtcccagctacttgggaggctaaagcaggaggatcacctgaacccaggagttggaggctgcagtgagccatgatcatgccactgcactgggcaacagattaagactctgtcacaaaaaaaaaagcgttaagttaaggagcgtgaataaaaataatacatttcatattctaagacaatatcatctacaactttattccaatataaattactaaaactttaccatataagtagtagaaagcctgaatagataaaagctatggaagaaaaattaaagatagtgatagatttatcaccaagctcagatggttctgcaaacaaattctaagaaaccgtcagggaacagatcattactgcgttgacacagaaggcaaacctctcaacttggtgtataaggctagttaacattgttactaaaacaggcaaagaatggcccccaaaataactctaaaccagtatcacctacaaatacaaaaactctatataaaatattagcaagtgagtacaagagtataaggaactctattaatgtaattcactgtgctaggttaagataaaaccataactcttcagatatcatagctctttagatagaaaaatgtaaaagtatttgataaaaattcaacaacattcctgactaaaacaaattaaaattgtaaaacccctggaaagccaggagtaaaacatgttctccataatctatagcaaacatcatagttgctgataaaccattagaagcatttccttcaaagttaggaataaaacaagaattgctactattgctactattatttaatcccatattggaggttttagccaacacactatggcaagaagaggaaatgagaaaggttaatgctgcaaaagaagaaataaataaagctaccattgctgatataattatctatccaaaaaaagtagaaatccatgattaaaagctatttgaactgataaaagttcagaaaattggaattgtttcaatatactaaaatcaattagttttctgcacatcagtggggatatattagatgtaatgaaaatgaagggtccattcacaatagaagctataaagtatttgagaataaatctaacaagatctacataaagaaaaaagtaaactgcttaaaagtaatttaagttcaccatttgcaaattgaactaaagaaaaatctaaagaagaactagtgaaaattgcttgcaatcttaccactgaaaagaaacctctgttaaaatgtatcagtattttaaaactgtgttttgtcctttggaaatatgccatattaagcaaacatagcataagcaaattaagcaaaaagacaaacctttttttaaaagcatatttgtgaaaaaagcatatttgaagctatgataagaaactgagtagaagctataaaacgtagattcatcaggaaggagcagaagttgaaaaggagatttctggctgggcacagtggctcatgcctgtaatcccagcactttgggaggccaaggcgggtggatcacttgaggtcaggagtttgagacaagcctggccaacatggtgaaaccctatctctactaaaaatacaaaaattagaaaggcgtggtggtgagcacctatcatcccagctactcaggaggctgaggcaggagaatagcttgatcccgggaggcataggttgtagtgagccgacgtcatgccactgcactccagcctggatgacagagcaagactccatctcaaaaaaaaaaaaaaagaaaagaaaagaaaaggagatttctgagtagaaacacgttagcagaggaaacttcatttggggaacaggattgttttgatgccatgctccctcagctgaccacacagattacatcctggccagaaaaaggccctgcaaagagctctgatcattttggttctgattccatccttagttcttacccattatctgcttacccttcctccccacctatttaagatacaaagcaaaacaaaccaaaaatacagatgagttgcttggtagagctgcctaggcctccaaggcggggcccagaggattttttgactgaaccccctgttgtgttttccatatgtgcttccccagaccgcccaggtttgctgaatgtgaagcccattgaagacattcaagacaacctgctacaagccctggagctccagctgaagctgaaccaccctgagtcctcacagctgtttgccaagctgctccagaaaatgacagacctcagacagattgtcacggaacacgtgcagctactgcaggtgatcaagaagacggagacagacatgagtcttcacccgctcctgcaggagatctacaaggacttgtactagcagagagtcctgagccactgccaacatttcccttcttccagttgcactattctgagggaaaatctgacacctaagaaatttactgtgaaaaagcattttaaaaagaaaaggttttagaatatgatctattttatgcatattgtttataaagacacatttacaatttacttttaatattaaaaattaccatattatgaaattgctgatagta

SEQ ID NO: 14 - DNA, 14762 bp, Homo sapiens
acttaagcttcgacgcaggaggcggggctgctcagtcctccaggcgtcggtactcagcggtgttggaacttcgttgcttgcttgcctgtgcgcgcgtgcgcggacatggcctcaaacggtaggtaagggcgcgaggcgacggcggcggcgcacccggccgaggcctcccagctgggcttttcgttttcagtgggaccggggcggcgatcccgtgtgggattttttggcgcccctgtggcgggaagccgcggagaagagtaactggaggaggctggtgtcgccattttgtttcgctcctctggccctcgcgcgcggggcgggaagtcttttctttgcagtccgtttgcttggggtgggcgttgggagggacgcttcttaggggtttgaagcgtcaggtgagggtggaaaacgcccattctccgtggcctcgcctcccccaactcccggccccgcgctcgagcccgctttgtcgcagtgctgcatccgggcactcgcggcgcgcacgcgctctgcgggcccctcccccttcgcggcgcgggtaccccttccccgcctcgtgttggttcagctttctgtcgcgagacccttcgcggaagactcggcggcgcgcgtccggtgtgagccttgtccctcagtggtccttcgcgaatgggcgggatcgctccgttcccgcctgggttgccacgcggctgggggcggaggctcgggatcggggccgccctctagcttaacggtttggcggcggtggtcagggttcgaccaacggacttggggacggcccgagagtttttcccgcctaaatttctttctttttttttttggagacacggtcttcctctgtcgcccaggctggagtgcagtggtgcgatctcagatcactgcaacgtccacctcctgggttcaagtgattcttctgcctcagcctcctgagtagttgggattataggcgcccgccaccacagcccggctaatttttgtgtttcttagtaggggcggggtttcaccatgttggtcaggctggtctcgaactgctgacctcaggtgatccgcccgcctgggcctcccgaagtgtcgggattacagacgtaagccaaccacgcctggtctaaatttcttttttctgagatagggacggagaagaacggccgcccgaggccacaccctctcctggtcctctttcccttttcctgcgggggaagcgccgcgtttcctgtgctgggaggatgagttgatcttgttcgtgtatcttaagtggggcttttcaaaagcgcttttgttgctttttgttcgctgggggaaggcagggtaggtgagaaaacggaaccatctggagtcccagggctggggactcgagtacctgttgactttcgcctcctaaggcgagcagttgcatgatctctgtcatttggggtccaagggctcttttgattctctggctttgcactaaaaagcccacttcatctccgggattggtcaaagagtgaagaatggccttttttgagactttcttattctgtgggtctgggctgagagagcagaggccacaatctgaacactgttcgaattcaaacctgtgccactttggtagttctgcgacgttgggagagttagtctcttgactcctggcgataatggctttctcatagagtggatgaaacgaatgcgcgatgttttagagcaatcactgacatgaattgggcttgcagaaaattgtggatgtccaccaagaccttggtttttccaatggttaaggcttctgggactctgtagaaacttgcattttcttcactttttctttattgtaagaacacttggctgataacgccagtttgttcctcttctcaaccagtgtctcatggaggaattttatgccctttgttgcaacatggtcctatttttatttttttttttgagatggagtcttgctctgttgccaggctggagtgcaatggctcactgcaacctctgcctcccgggttcaagcgattctcctgcttcacctcccgagtagctgggattacaggcgtgcgccaccatgcccggctaattttttgtatttttattagagatggggcttcaccatgttggtcaggccagtctcgaattcctgacctcaagtgatccacccacctcggcctcccaaactgctgggattacaggcatgatccaccgtgcctggcctacgtggtcctttttattcatcagtgcttgagttaaggaatttagctttaattcaactctttcagagtggcagctgaagataatgtgattgtatttttcttttgcagattatacccaacaagcaacccaaaggtgagtgctatttttgggcttccagagtttgtagagggcaagggtggtcacgccatgttttctgatcacgctggttttccttttatttagctatggggcctaccccacccagcccgggcagggctattcccagcagagcagtcagccctacggacagcagagttacagtggttatagccagtccacggacacttcaggctatggccagagcagctattcttcttatggccagagccagaacagtgagtctttctcagcgggtcacctcttcctactctttctgaatattgcttttctttttcttgttttttggagacggagtctggtcctgttgcccaggctggagtgcagtggtgctgtctcagctcactgcaacatcagcctaccgggttcaaacgattctcctgcctcagcctcctgagtagctgggattacaggtacctgctaccacgcctggctaattttgtgtttttagtagagatggggtttcaccgtgttggacaggctggtctggaactcctgacctcctgcctgccttgacctgccaaagtgctgggattacaggcgtcagccacaatgccctgaatgttgcttttcttaaacctgagcagcactgagatgttgaaactgttccatatttcttttccgtgaaacagtgtataagtcttaaaactttttgggatctgagtcctttacagggcattgtggcacacctgtagtcccagctactgaggaggctgaggcgggaggatcccttgaattcaggagtttggggctgcagtgagctatgatggtgcctgtgaacagccactgcattccagcctgggcagtgtgttgaggccccatctcaaaaacataaaaaaaaaaacaaaaaacaaaaatgtttattggtttgtgattctgtttccatttattttctttggcttttaatttttttgactcttcttattttccatcagcatgaaagagagcatattttctaaaggaagaaccagttttaggccaattctgaaatggagaaaatggttttgtttgaaaatgtatgaaatcatgtgatacataaggaggtgggatttgccccaaggtcctgaagtgtaactaagaaaggtggttgtcctgtagatactgcacgcacagctgcatattacagtgctgttaacagggatccttgggcctgggtttagagggtggtgctggagatggtgttgggattggcggggtgaaattggaactgtactaaagagttggtagaagttgaagcattaaatttaggctttgaaaggagggtaactatctttgcctatgagttgcaacatcactaacagcttctgagaggctggctttatgagtataggtattatgttttctttaacccattccttacattttctctttcctggtggcttttgtgactccctttttcttatcctggtagcaggctatggaactcagtcaactccccagggatatggctcgactggcggctatggcagtagccagagctcccaatcgtcttacgggcagcagtcctcctaccctggctatggccagcagccagctcccagcagcacctcgggaaggtacggtggtgttgatgtcggggaaggcttgaaaagaggggtgaattgatgaggaatgataaagggaccagcagtaggagcagttcagaggtgtaattggggtaggggagcctgtgttgggtacagagaatggactccactaaaagtgaaaggaaattgggggctatgctgggattgtgattgtgttttttgtttgttttccctagttacggtagcagttctcagagcagcagctatgggcagccccagagtgggagctacagccagcagcctagctatggtggacagcagcaaagctatggacagcagcaaagctataatccccctcagggctatggacagcagaaccagtacaacagcagcagtggtggtggaggtggaggtggaggtggaggtgagatgtcttcagctttgtctgcagcccattttctttttctttttttttttttttttgagacggagtcttgctctgtctctgttgctgaggctggagtgcagtggcacaatctcggctcactgcaagctccgccttccgggttcgcgccagtctcctgcctcagcctcccgagtagctgggactacaggcatccgccaccacgcccggctaattttttgtatttttagtagagacggggtttcaccatgttagccaggatggtttcgatctcctgaccttgtgatccgcccgccttggcctcccaaagtgctgggattacaggcgtgagccactgtgcctggtgtctgcagcccattttctataaggatttgtattctcctgttttagcttaaaagagggttcctgtcttgtttcctagctgtctttttactttcttttgtccttcattgcctggcacttgtcaaaccttttcaaaccttttagtgctactttacaatctttttgttttttttttttaatcattctttcttttctcacaggtaactatggccaagatcaatcctccatgagtagtggtggtggcagtggtggcggttatggcaatcaagaccagagtggtggaggtggcagcggtggctatggacagcaggaccgtggaggccgcggcaggggtggcagtggtggcggcggcggcggcggcggtggtggttacaaccgcagcagtggtggctatgaacccagaggtcgtggaggtggccgtggaggcagaggtggcatggggtaggtgtctcatgagccagggagtatctttggtggggagtgtggaggattgcatgaatctccctgaagccagtccctagtgcatggtttagtattcttgttgtctagggatctgtgagggctttgatttgggggcagtgactttctttttacatccccattttatttttgtgagaacttgggagcctgaactcccatccataccactgaatagagattttgagtaatgatacttgtttccaaaaaaaaagaaaccatacatagatacgtatggattggagtcattaatatcctaggcaagaaacatggaagtgaagacttctttctctgcaagggaaaccgatgatcccactcctgggaaatagtagggaaacttggtatgtgtattcccatgtgtcctctagggagttggtaatggttaacctgacttcagcttccaggaattggctactcttcccgttttctatagtcatttgaatccacgagcttgatttgcactaatttgaccgacattgattttgtgtgtgacttggtttatggggccagctgactgaagtaagcagaccttttgggcaaaaatatgctttgacagtggtctcccacctatttgttccactgtctgccttcccctggttacttaaaattcatcagcttgtccaactggaccttctttccttcctgctgaagttgatttgaagtaaaaccttagatttgatgttaaaacagttgtcaaatctgttggtaaataagatttgaaggaccctactctgtctcccttgaaaaaggggaggaatgtcagtgttactgtttttggaaaaagtagatttttaaaccgagtttggaaatggtaagtatgcagaggtgggtgggggcaatctcaaaaacgtgcaaaaatgaggaaaacaaaaatgaggaaatgtgtgcgtgtgtttaatgcaaaactttaaaaagaaaaacaactgttatgtgactgttaacttgctctgcattttatgtgccacaggtatgaaaggtgacattgcaaaatactccgctcttctcgcagtgtagaaggggtgaccccgggggttgggggagatcaaaaacagctcagtagttaggacagagcttagctaagtttgtcttgctttaaggggaagttgcctttggttttgactttttatggaatggggttgggtctgcttgctgctttcaaagcaaaaaccacaaaaatgtgttcaaggctaccccagcctggtgtgaaatgtcttctgggtaaattggggtagggtttttaaaccaactacttggttgtcaaccacttgcgacaagaggaaaaaaaaacatctgctccatcggaagaacgaccaaggaaaatgggttattttttttccagaggaaatagataacgtaaccttttaaagcaaaatctttataaactgtgtctgagaaattgcacacgtgtgtgtgacatgctcaaaggtcagacaaggggtggtcaggaagggatgtattttagtagccacttgtatctttttccaaaaacacctacccatgtttggggaatgttaaacaaaatcaaaaaacaaccttttgtagccgttggaagcttcatgtcctttcttctaacttgtcttctccagcggaagtgaccgtggtggcttcaataaatttggtggtaagtgaacagagtttccaaaattcccaactcccagcaatgctttgtctgattgttcatttgcagatgtcttagcgtgttaatttaaatgtcaaaggttttgaggtgtccagaaccacctccagaaaggggtagggtagaatgccacctgttgcctggtgtgtgctaacctggagcaggtaggggtaagactcaatagtcatcttttaccaaatgggtttgccccaggttaataagaggggtctagtaggccttggactgggccgttgccacacctggcacttagtgaccatcatcatgagaaactggagagtgcgtgctggaacacgtggtgccatcttggctttaggatccttttgatcgttgtgtccaaggcttgtgtgtgtgtgagtgtgtgggagacaactccgaatgtttaattctggaagagggatgtaacattgccctgaggatggtgaagttggtatacatttataaagtacggaatggtgtcaatgaatgcaattctatgtatatggacttaactgagatgggcaaatagaaactagctctgggaaggaacatgtgcactacttcaagaaagattggaagcatgtgtggctcatgggaaataaccaggtcttaaacagcacaaactgaattcgtggaccaggaaggtcttaaacagcacaaactgaattcatggaaaaatgacaaatttgagaagtctcccagtaagctggaacttttctggtttggttaacaaaaggtttcttgatttgtttcaagatttaaagccaaaggtgtgggttcatgacttaggtgtcattgcgtgtgggtacaatatttatatatggcgaattcagataaacattggtcaaagatggtctctggaaaaacaaaatagaggctgcattacggaaataagatttctggtctgttccctgggacatgcttaaaaaatacaatagctattatgtatggtttttattttcatgtggtttcggggaaacaacacggttttaaggatggtttctaaagatgaaattaaaaattgttccacaagggttaagtgtctggtggtaaagttgggagaaactggatggatgcacatcgcatggctggtggcgagcccatctctcttctctcgggtgagagaaccgggccaagctgagttggtttgttcactttaatgggtctccgtttcccctgccacctgtgctgaggacatttcccagcctgagctgggggaggcagcatttgctgaagtgtggagttgtctctgtggagactcaagttacagatcttaaggggcctgcctagaattttctcctctgggcaggcgacccaggaaagggtttggagtgaggctgtgagcacttacttgatattttacaagtttggatttggtgttaatttttttccttgtccgttttttcctgttgactaacggctcatcttttccttgtttttgttttttttttgttctttttttccatgtcactaaaggccctcgggaccaaggatcacgtcatgactccggtgagttcacacgtggtggcatgaaaagagtggctaaagtggtatcaagactgcctggatgttctttgaaactattataaaaaggaaactgaaaaaaatggggatagagaaggaagggagttaggtgtgtccttagttagcagtgagaagtatttgttacgaagtatttctcagaaatacctggcttgtgggttccacccccagtgatttaggtctgagaggaccctgaaaatctacctttctaacaagtccccagtgatgctgatgcgtctggaccacactcagatggtttacagcagtggttctttcaaaatgtggatcatgtccaagttggtgaacaaaactagtgaaagacctgaccacatgaagtaaagcattgaactcctgtttaggttgtattgatgtttgtgtactagatttgaatgtaaaatgggtttcttatttaattcggggaccttcaactgaaagttgataaatactgatggacttttctgtgtggtcttgttgggcatttcactcctgagccctggtttccatactgtatactgggtgttaacatgtttcaaaggataattgtcaaactgaatctgaaatttatcagcatggctggcatatagggactcaaaagggatgtggatttctttttagttgtcttccataaaccaaatgataccagttgcttgatggatactaggtgctttaggttttttcctgtgttttttattttaccttttcacatttgcattttctctgttcaacaagcagaacaggataattcagacaacaacaccatctttgtgcaaggcctgggtgagaatgttacaattgagtctgtggctgattacttcaagcagattggtattattaaggtacttgtggagaggagtgggagctttctgtcagtgttgtaggcttgtggatttcacacattagtaaaagcaagtctttaatggttgccagcagtaaaaacaagtcttagtggttgttgccagcttaatttgttgaggaaagagccttagttactgttttctaaaagagaagttctatcttaacacaaaaagtataacttatcagagtaccctaaactcttgagatttgtactctatagtaacttttagttttatctttcaatattggagtgagagacagttttctttaatggaggtttacatgtgaggtaggaagaagtaactgggaagaggggagctgaagtttgggaattataaacctcatgttctagaggaagaagatggaaagggagtactgtagcctttaaaattgatgttacctcattttgctttcttcagacaaacaagaaaacgggacagcccatgattaatttgtacacagacagggaaactggcaagctgaagggagaggcaacggtctcttttgatgacccaccttcagctaaagcagctattgactggtttgatggtatgtatgagaaggctggcagaggtggggctggggatatagggcagcaagccttaggaaacaagccatagtttgagggttcttttgagtcttccaacacttactttagctgcggtttcaggtagtctcatttttgcttatgtgtcagcagattataaaccatttgagaaaggcacgcttctcttgtattttcggattaatgtgtcttgcatttaaagtctgttgatgattttttgtttctctaggtaaagaattctccggaaatcctatcaaggtctcatttgctactcgccgggcagactttaatcggggtggtggcaatggtcgtggaggccgagggcgaggaggtgaggagctacctgctagtggtgcagaggggtaatggggagagtgcagaagatggtaaaggcttgcatggaatgggttagatttaccaaacttggagagggagcagacccatacttggtctatctgcattaggacccatgggccgtggaggctatggaggtggtggcagtggtggtggtggccgaggaggatttcccagtggaggtggtggcggtggaggacagcagcgagctggtgactggaagtgtcctaatccgtgagtgaaacttaatttttttcttagttctcttgcatgcgtgctctttgatatattggtactgaggtatgtgcgtgttttccaaagaagtaaatgtcaaggccacactgttggggtcagatttagccaaaagcttacctaggtaaggttgatgtaatgggaaaggtaatggattgggttcagtaatactgatttttgttcctgactctgagaagcaagccgttttgtctttctgaagcttcagtttcctcactgtatctctaaagtcaccgtagtttcttcctagttctaggtcttgcctattccccatcgctccagactgattgtcttcctttctccttagcacctgtgagaatatgaacttctcttggaggaatgaatgcaaccagtgtaaggcccctaaaccagatggcccaggagggggaccaggtggctctcacatgggtaagaaaggcagacctggtgctagggagctgggaccaaagaatccttaatttttcagcggggaggctcggggaacataggggaatgggaatatgatagatcttgtttcttttgtcctagggggtaactacggggatgatcgtcgtggtggcagaggaggctatgatcgaggcggctaccggggccgcggcggggaccgtggaggcttccgagggggccggggtggtggggacagaggtggctttggccctggcaagatggattccaggtaagactttaaatcagaataaaaaagtagagcagttgaacagaggccataggataacagggttttgttgagaaagtggtttcattttgagggctaggtggaaagacctgaggttgtaaccagtagtggagagggaaggaaaattaactcagggggagtgaatctgtagacccacttgagataagatactcgctgggttaggtaggaggggcagataggatatctaggcttggagaggctggtaactcaaatataatggatacttaatttttttttttttttttgcaggggtgagcacagacaggatcgcagggagaggccgtattaattagcctggctccccaggttctggaacagctttttgtcctgtacccagtgttaccctcgttattttgtaaccttccaattcctgatcacccaagggtttttttgtgtcggactatgtaattgtaactatacctctggttcccattaaaagtgaccattttagttaaattttgttcctcttcccccttttcactttcctggaagatcgatgtcccgatcaggaaggtagagagttttcctgttcagattaccctgcccagcaggaactggaatacagtgttcggggagaaggccaaatgatatccttgagagcagagattaaacttttctgtcatggggaaagttggtgtataaatgagaaatgaagaacatgggatgtcatgagtgttggcctaaatttgcccagctatggggaatttttcctttaccacatttatttgcatactggtcttagtttatttgcagcagtttatccctttttaagaactctttgatcttttggcccttttaatggtgaggctcaaacaaactacatttaaatggggcagtattcagatttgaccatggtggagagcgcttagccactctgggtctttcacaggaaggagagtaactgagtgctgcaggagtttgtggagtggagtcaggatctaggaggtgagtgactcccttcctagctgccctggtgaacagcgcttgggtagatacctgctataaggagactggtctggctgggttactttcacatcctgcctgtactcagagggcttgaggtcattgacattatgagattttaggcttgatccctttttgattggagggtggaaggccctcctaagggaatgataagtgataagagggggaaggggttgcagccaatgagttaaaaccttagagcagtgctcctcagcctcttaccatgtggttgtaaacttgcacgtacctgccaaccagttatttagcatgctttttattttagttacacagagcgtaacattaacccaagagcagaaaggttttatttacagggttttcgaacttggtttgtaagacagctgccatcacaagcatagcttacaaatgtgctggggacccctaattgggaagtgctttcctctcaaatttttattttttatttttagagacagagtcttgctctgtcatccaggctggagtgcagtggcgtgatctcggctcactgtagcctctgcctcctgagtttaagcgattctcctgcctcaggagaatcccagcttctgagtagctgagactacaggcgtgggccaccatgcccacctagtttttgcatttttagtggaggtgtggtttcactgtgttggccaggctggtctcttaactcctgacctcaggtgatccacctgccttggcctcccaaagtgctggaattacaggcatgagccgctgcatctggccatcctctcaaattttcaagtgttccacaagtatgttctctactgaagagttgctgcatccttgaatcttgggtgatttgaggcacagaaactatgactttattttttgagatggagttttgctcttgttgcccaggctggagtgcaatggcacgtttttcggcttaccgcaactgccgcctcctgggttcaagcgatagctgggattacaggcatgcgccaccatgcccagctaatttatttgtatttttagtagagacggggtttctccatgttggtcaggctggtctcgaactcccgacctcaggtgatgtgcacacctcagcctcccaataaaccatgacttttaagaggaatagcaggtttacttcccctgccagcattggggtgctctctaagcaacagtaggcggagagtggtctggcgtattaaaaacaaaggatcgtcaagtgggccttcccaggcattgctttgacttagtacatgtagaggatgtggcagttctctccgtccctgccactgctggtttctttgttaaatgtttagttgaaatggcctgatacgatatttgagtagttcactgttggtgctttgcctagcaggattctaatcttgctttggttgtggtcccctgatgccctcctgttaggagtggaggaggtcgaagctccttgtaagatatgattactgggaccattagtgtcaagttcctgtgtccttcaaatggcatatgtgattggccttgaccttaaaaggaaatagggtcccaggtgactgtttagtgggtaggtccagtttggggggatcttccaggagaatggatagagacacctagcagcagagagaacattggtgcctctcaagccaacctcccacctcagcctcccaagtagctgggactacaggtgcttcctcgctaccacacctgggtaattttttttttaattacttttttttttttaagaaacagggtttcactgggttgcccaggctggtcttgaactggcctcaagtgacctgcctgcctcagcctcccaaagtgctgggatcacaggtgtgacccactgcgtttggccagaatactctattcttactgaatgattgaaatctgtcttgaagcattaggtgtcccatttttgtgagttggaattgggacaggctaagtaggaagtgaggagggtggggagagctgtgctgtaggtctgtttgtcccttccttgatgtagccttcagttagccctttcagcttttttccccatcttgtgccgggccttcctgggtttcagtacttggatgtagggctgcagttatgtcagtggtgggtagattgaccaggaattaaggtctagggtccagcccatgtgagacttgactcactgatctacctttaggcatgtcttccttccagtctcatcctttttaaattttttttttttttttgagacggtctcactctcacccaggctggattgcagtggtgtgatctcgaccaactgcaacctctgcctcccacccgcaagctatctgcccacctcagcctctggagtagctgggacgggactacaggcacctgccaccatgactggctaatttttttttgtattttttgtggagatggggtcttgccatgttgctcaggctggtctggtctcaaaactgctctgggctcaagtgattgtcccactttggcctcccagagtgctgggattaaggtgtgagatactgtgtccggctatgaaaattttatttttaattaacttgtatatatttatggggtacaatgtcctatttctgtacatgtacacattgtggaatcaaatcaggctaatatatccatcacttcatatcattagcatgaatgagaacatacaaagccactcttagaaaattttgaaatttatgttatttcagcccttttatgctggaggttgcaaatgttttgtgaataatcagaccaaaaataaaaacaaaaaatgattgacttcagtcattcagtaagaa

SEQ ID NO: 15 - DNA, 90335 bp, Homo sapiens
ctgcttcacttcacggggcgaacatggcgcacagctgtcggtggcgcttccccgcccgacccgggaccaccgggggcggcggcggcggggggcgccggggcctagggggcgccccgcggcaacgcgtcccggccctgctgcttccccccgggcccccggtcggcggtggcggccccggggcgcccccctcccccccggctgtggcggccgcggcggcggcggcgggaagcagcggggctggggttccagggggagcggccgccgcctcagcagcctcctcgtcgtccgcctcgtcttcgtcttcgtcatcgtcctcagcctcttcagggccggccctgctccgggtgggcccgggcttcgacgcggcgctgcaggtctcggccgccatcggcaccaacctgcgccggttccgggccgtgtttggggagagcggcgggggaggcggcagcggagaggtaagggggcgaggaacccccaggtccggggtctcgaccctctgcggagccccctcccctcccccatccgggattgaggagcatcccaattctgggaccatctcggggtccctgacccggggcgaatggctctcccatcttgggacccccatgcagggctgcagacccccaggcgcccccaccccggggtttgggcccatctggctgagggcgtttgccccccgctctcctccccctgacccttccccaaatcccttggcacagaccccctcgccggggtttcccatcccgggactgaacccctcctccctttcacagattacctcatccgagcaagattcctccctccctccctcctagagacctgatcccgccacatccccgcctccctctctgggcagatgtgttactcctagggcagttttcctctcgggcgtctctcgggtgatggcctcatccagggccacgttctcctggcccttggggatcgtgtcccttccagcaccttgctttcgaaaacccgatgaaccctcgcgccatccccgggccaggtccctatactgccagccactcccccttccttcacctccaccctctacccccaccccaagcagaccgatcctcccccatcccgccctaccccaccggggaaaatctctcctctgcaccttgcctggtctcacctcctttccctctgaagataacggtgattcctcatacagcagtctcttcccccccccgccccgtcttacagggctacagtttctagcctattggtagccgggaattactctaccttcactccaccctttccctcctttagaatgaaggattagtggcatcttggaggggaaaatagtccactgtcccctaggcttagagaagagcagctttccaccactccccttggagaggaggcaggctttccctccagctctggggaagggggcccctgtgaggggaggtgtttgttgggggactgaggcagcatcctcccaggggaagcagctgctctcctaccccacccactgcgcctgagagcacgcagtctccaacccgagctccctcccgcccttctcttctcgtcatttcattattgatccaccttttcctaggccaatcctggggcttggaaggggtgggggaagccaggttggggtgaggagagtagataagggacagttatactttagtgtggtggcggtggttgctttgggatgggagaaaaaggattatcaagcaaagttattccttagaaaggacttggggttgtctctgattcttgtaaggggacccaaggtggatgaagggtcagagcgttgccccttccccattagtactggggcaagaacggagttgcttctataaacattattcggcccccttcagcaaaaaggaaagttgcccaaggaagggaagttgagttcaggttcagccagtggcgttgcgcatttgttttccattggatgcagaaggggggagttcgaattgtagaggggggaggatggcatgggggatgctaggaggaggaagagcagctgctaggggctgaagcgaaggggggtagggggttgctgctctggagtgctcttgattgaaacagaaagggaaagataacaaccagccgtttcctgcgtgctctgccgttggtgcacacaaaatatcctgggcaaaccccttgtcccctattgtgccccgcacccctttagatttacggaaagatcctgggaagaaggggagggaggagatcccaaggaccctggcccctcctttcaaggagctggcattttttagttgttagtcttcctgcctccttttttttaatcgtttctaaggcagcctgatcaggagactgacaacaacccgccttctgacagagcaaggaggacatgatgggggcgtgttccttgctatgtagctagctgcagcgtcccctttccctgcctctttctgctctatctccacctccttttcccagccttcagaaggcagctgcagtcagcagggttgtttgagactatttattggttgctgtagattattatttttttttgaaaggccaattctgtattttttaagctaacaacacagatcccatgtagttggagaaccaaaggccacatacatgacaaaaagactgaaccgttcaggttacttgcatggagttggtgcttaaatgtgagttgattttgcttttttaaaagatacagcagcaaaaaaaaaaaaaaagaaaaaaaagaaaaaactgacatttcatttacctgcttattttcaaaattgagacttgcctggttatatgtagcattttagccccatgtatatttgagtttaataagaaagtctctattaggagaagttagtccattttaaggggatcctaagaagcattttcttcttgttcagtatgcttatttattttgtatagaaggactaagcattcacattccaaatattatcacatattcaaaagcaaagttttatgctgacagcttccaatcatagtttttcaagagactggttagaaagagagccacctggattcagggacctaatgtctgggcaccagaatattttatctgttggtctttgacaaatcacttttaaagttttaatcaggggctaaacgttttcttatctactggcattatgagataattgtaaactactgttttatttttcttaacactagtatataatgtaaagcctgtcaaggaattgcagttatttcaaataggatcatatttataaggggtttttgtctttaaaactttttcctgaacagtagttgctgcttcattatgagaagagtggttgactccttacattaaacttgagtattttttctgaattggacttgaatgagctctgttccatgggtaagctttttatgtggtgtttgaggcaatccagtatgagttgatggtatgcattgagtagtggtaaacctctgagctggtagttttcagtgtagaagcaagcactttttttttttttttaacatagccttactaatcaatgataaagttccaaaagggaagtttagggttcaccctgggctgacatagaattctaaagactgcttctcagaactcactcatagctctgtatcaagtcttatctggattcatgaagaaatggttatatgatccaaaatgattctaacctctttaaactctggttcgccttcagtgaataatgactataacttgcctatgtaacaacacctatgttaatacttctaaaactaggtaacagaacttccagatgactttgctgtttgaactcccttagccataggagacttgtccttcactgctgttggttcctaacttcctttgtatgacaattaggaagtagaattgaggttttgttttattgagcactgtaagaaatcagaggtccattttttgcctttccccttccctctgtagtgtcagtatcccatttttctaaggattctctcaggtaatgttcatactactgtactttgccatctaaataaacatagtacagcagcaccctttctgttgactagaagttaggctgttgtaataataaacccctgaaacagtgtgtttatcagtaactagtcttcgtttattaatgtcataatccagttaccttccctactacttcacaaaatattaaaagcaaaatttccatcctgatcataacatagcaaactttaattagatacaaattgaaactgagttacagcattggtgtgtatttattttcacttgaaattgcagtttagttcatgtggactgagacaggcttttggattggacttgaaaagatagtactcctgcagctgaaaggtagtaggagagcgtgattttttttttttttttttaatgtttactggtcatgtatgtaccaagagtgggagttgctccttcgttgccttcacagctagtcctaagattggcagaaggtaaatgaaggagggaacacaagcagagtggagtgcacgaagcctccgagtagaagtcagtggatgtgggctctcatctccgttactgaacagttatgagaccctgggcaaattcacttttaaccttaaatttctgatctgtaaaatgaaaagtttggactaaatagctcatgaatctgttctgtgtcagtattatgattcctttctgttgtattaaacttttggtcaaatcagaatttcttattctgagtttatttcaaaagtcagagtcaagtgagacgatttgataatttttgttttttttttgagtcagggtctcactatgttgcccaggtgcatcttgaactcctgatcctcctgccttagcctcctgagtagctgggattctgtttggtaatttttaatatcagattatacatttgcctatataactggcattattattaggaggagaaatttcaacttggaaagttttcgttgtgtggaaaaaacataaggactttggggaagttgaccagtttcatttataagaaaaatgaggataaagtttttacacatagttctgagaacctacagaatcccaggcattatctggtgtttagaggccctcttgtttggctaaatgtgttgtcattgttgtgaattccagactatccaaaagagaagttattttcagtctaggtggtatattcctgtaggtgtatgaattttgaatgaaaagaaaaatccaatacatcaatgtatttataaatctgaagtgatagtacctacttcataggatgtagttattaatatgttctgaaatggtttatactgagcattagaaattcagtctttagaacttttcttcctctgtgactgaaaaccagatgacatgtccccatctttcacttccatttaattatcttaaggcacatactcctggaggaaatcatcattcacacaatagtgatccatcttcttattggaagttgagagaaactattcccatcttgacttaattctcatctctttgctcaccttagagctgtccttccgtggggcagctgtgcagactctataccaattgcctcccttaccctgtggctagagggggtggcaacagtgctttgcttgctcagaggcataacagactgcagtgcctctctcttttggaaactcgctgtgttttaattgtaggtctcctaattaagatctctttgtgcctgcccacattccactagtgttggcacagagcttcagcttccttctagcacttaactgaaggccttcaatcgggccttttgtgaatatcttgtctctttccattcttcctctgccaaggtggagagcccagtggcatagacctttgagaagggggaagctttgtgactatcactactttgggaggaatttattcgaggattgctgggatgggaccttcctttgtttgcatatgttattttcagggattaagaaaggttaaattactaatgagtctggcatgatgtacctacattttaatcagattcttaaccctgtaggcactagtaggaaagaggatgccacagagttcactgttacaaagtatttccttggatcttatctagactggtttatgaaacttgatgagtaaaatattgtcgtggagtaaatctcagactcgtgatttttgtggactctgaggttgttgaagacaagacaatcagatgaaattattgattgctcctaagttgtatcggctttgagacacagactgaattaaagttagctttcagatctgagttaacttttgattagaaagactttaggaggttctggaaattgttgagttaattaagaatacccttgtaggctccactatttcttgagattttcaggaattgtctaggcttctagagtattttcagaataagataaaatagcttttctggaaaaagtagtttgactttagtttccaggaccttcgtattcaaaatacagtatgttctttactagatctacatgtggcatgctagagaaaatgctatcttttattaagaaaaaggaatcttaagtcctttacctggacccagatggcttcattgatcacatcagtatgaggttacgcagacaaagggctatttttgttgttgttattgtcatttcattggttgttgaagaaggcctgggagaaggaagtacaggatcttttatggcatgcattaaataaagctggaggcctgcactcttatacctgagtgggtggttttatggcctaattctctaattgctggcatttatgacagtgtggatgctactggccctgtggctgaggtagattatgctgggaatagggaggaaaaaggggtccttttgttagccttttcattttgcccctcaataaagtctctgcaaaaaccctgaggaaatacagagacacttggactgagggaatgacttcccataaaatggttctttatgtttttaaaatgatgagccgcttttcttgacctatccaaagaaatccataccaccactgttaaatatttcaatgagttttttaccttgtcaggttacacaccaggggaagccaaccatgagactgtagctgctgccaaacattcgcttctaaagacttaagacatttgaaagaagaattttgttacgtgatttgtaattgttgtggatgatataaatccccttgaaggattagtccaaaacttctaagaggccaagcttggtttaacttttagatgttgaattgaatgtattgccctaatgagttttagttttaaggaaacaacaaagatataagagttagttggcagttttgtgtgcagtgtatgaaaattccccttcccttgaaatgagtagttgtttttctatttgacaaatagactgaagggatttccccagatatcttaccttcaattattgctgcagcagtaccctgtgaagtaccagtgggcagcatcggtccagtagcatttatttcaggagctggagtttcttccgtatatagtgttttatccattttcttgcatttctggttttgtgttttgttgggatgtttgggtatagatgttttgatgtctttcagcaacaaaagatatgaatctttctaacattcatactgttttagagagatccacttgtattatctatgctttgctgaagcatcattgtttcattcttattttacagcatcaaggtaatggtagctttctgtcttgaattaggagagtgatattacttgtgagaagggttttggagaatagttttttctttaggctgtcctttatactatctcagttctaaacactagggaaaagttaattcttatctctaataaatatcctacacctagagaaagaaatatttacacatgcccatattcaacttctgtccatccatgaggattgaccactttttagatcaaacacaaacattgtccctagattattgcctttaattataagcagtaaaaccttgtggataacatctctttaagcttagctaatgaggaaatccttttgtaatctctttggctaggattttttatttgtgcatatataaatacctttacagaagaaagggagaatctcataatctaatctgtagtggtgtgagatcgtttagcatagtaattaagagttgttaagaccatgggctctggatttaaactgcctgagttcaaatctaagctcagccatcttgaaaaagttttttttgtgttttgtttggtttgtttgagacaggatcttgctttgttgcctaggctagagtgtaatggcacaaacatttcatttcagcctcaacctccagggctcaagcaatcctcttgtctcagcctcctaagtagctgggactacaggcatgcaccaccacactcagctaattgttttatttgttgtagagatgggagtctcaccatgttgcccaggttggtcttgaactcctggcctcaagtggtccccctacctcagcctcccaaagtgttgggattacaaatgtgaggcactgcacccaaccagaaaagtttttgaacctctccatacctctgtttcttcatttgtaactgagaggtactcatgcttcatagtctcattgtgaggcttaagtgagatcatgcatgtaagcacttagcattttgcctggcacataggaagccctaattgttagaaccaagagattgaaaggagagcagggttataatctttttttttcatcaaaataactggtttttattacattaagttatacctgtatatgtatgcatacatacacctatttgagtgctataatcttagaatgttcttgatattagtctgagtgtcaagttcttctataaactaggtggaaccaaattgaaggccagccacccgtcttggtaacaacattagtgtccaactaaagcatattaaagataaggcaaaaaagaagaaagagaacaagatggtaaataggcaagtaagataccgaggaacacagtgcctccatgagttgctaattatcaggccaaggcagctataatggggttgctacctgttgtctctataactagtgttcctgatatttttatgaggaggcacttggtcgttccttataacagctctgaggctcttcagggttcttgggctccaggttcagacccattagtctatacttgatgacatttgttcttaagtgtcagcttgaggagaatgagtgctggtctacagagatcaatgcaagtaaccatttaattatagaagaaatgctgaattgtaggttgcaatttctgggggttggaacttgagcagaatggtcaaaagcagattagagtttaagaataactagtaaagagtagtgtgtttaaggaggaaaagtacagttttgggttgggcgcagtggctcacgcctataatcccagcactttgggaggccaaggcgggaagattgcctgaggtcaggagttcgagaccagcctggctaacatggtgaaaccctgtctctactaaaaatacaaaaattagctgggtgtggtggttgcgcacctgtatccccagctactcgggaggctgaggcaggagaatcgcctgaacccaggaggtggaggttgcagtaagctgagattccgccactacactccagcctgggcgaaagagcaagactctgtctccaaaaaaaagaaagaaaaaaagaaaagtacagttttgctgtactctctttaaaaagatttgcaggccgggtggggtggctcaatcctgtaatcccaacactttggaaggccgaggcaggcagatcacttgaggtcaggagtttgagaccagcctggccaacatggtggaaccctgtctctacttaaaatacaataattagctacatgtcgtggtgcacacctgcaatcccagctacttggggggctgaggcatgagaatcgcttgaacccgggaggcagaggttgcagtgagctgagatcacaccactgcattccatcctggaggatagagtgagactgtgtctcaaaagaaagaaaagaaaagaaaagaaaagatttgctaacatactcagtacaccatcagaaaccatcaatacacctcagaaactgaggcacagacaagttaaacagttttccttaagttatatggctagtaagtggcagggctagaatttaaatctgaacctacatctgtttgaaagttgattcttgctctctacactgtgctgtctttaagtcctttctcttcccactcacatccaatcaatttctgagtcttgtccattatattattgtagtgtttctttcatttgtccctgctgttctgttcctgctgtcctagtttaaatttccattacttttggatagtttattgtggtaatcttctcattggtcttcccacctatcttttcaccctacacagtgcttcacaatatgatagttttcttaaatacagatcagagtatgtcactttattcctaaaattctttggcttctcactgaatatgaaataaaatttcagattctcagcgctgcatgatcttgctagcctgtatttctaaattttgaaccgtgtctcctgaatgtacatcgttactgcttcaaccacattggactactgaactattaggtgttctccacagtctttgtttatctgcctttgtacctttgctaaagcctctcctttgccttaaagtctttcccattttgacctgtcttgggcttattattcgtctcccatggttcaactcagatccccagatcctaactcttccatgaagttttcacagattgtactgctagttgaaactgaacttctttcctgttttctttttgtgttttgtatgttatccttaaaaaatttaaccccgtataccttatgtcgtggtacttttgaaatgtgtctgtctttgtcccattagatagtgactcccttaagacacgggccatttctaagtcatcatttatgttttatgttttttataatggtgactttttatatagtatttgttgaattgaaaatttgatgtccatacaacttttaggaatactttgctgggacacattacataaactaggagaacttaagactacgaacagaatatttggactaatcattaagaaatactaatttaagtatggcaaaggaaagcacaggtgccatgatgcgacatttttgtaaaggtattgattggggttttgaaagcgatgttagggtatcctgatgggatggcattatcttttatgtagataatacttagcactgatcatccccttacttgagtgttgtttccatttctaggttcctcaacttaaaagggatgaggagaccttggagacggttctgaggagactcaaaagatgattatatgattggaagtcagtcctatgaggaaaggttgagagaatgaaaggttaagaggcaacttaataactcttcaaaaaacatgaatggatccattattaggaatggtaaccagcggtttcccagctccactgacagcagaataagagaaaataggtttaaaccgaaatcaggagtagttgtgtaaagaacttattggtaatgatggttgtcattacagtcatggtaaaaaggttaccaaaataattttattatcttctctggaagtatattttaaaagtacagtcctgcctacatatgtataaaatgacctcttaagctaccttttccttctgtgaatcagtaaataaattcttattcagctcctcgaagcaataattactttccagtaggaagcttccagagatatttctttaggaagtaatggtttttgtagtggctttataggagaatacaaatttttaagtggagctaagagagaaatcttaaacatcaagagaaaccaaggaaaacagtaggtgtggtatcaatataggaaacaaataagtatttgtagcttttatgtccattttcagttgtcatttaaagaggtatagttcagaatagctcttgttaaggctgtcactgcttgtggatacattgtaacaaatgcttataaatcatttccaaactaatagaagtttgcttcatgttagttagtattataaaagcctctgacccttggcttttgaggctgtgtagagggcttgcatcactcagaatgaaacctttttagatatgttgggttgcagaaagcatttcctgtacagtcagaatgaaaacttgaattgggattattcatatagattaccaaaagtctgggcagagctgatattaccaccagccagttttcctactaactcttaactccaaaaccttcattgggttattgaagctttaggacttttgaatttcctactggaattgtgtatgaattccttctttcaagtgaactgatactagatttatttaagattagttatacatcttaagtattttttaagtggcatataatgaatggtctctacttttaaccagtctcataaaatgcctggggttcataggtgaagctggattgttgcaggaattctgcaattgttggcaaagcgaagggcagtttgactccttaattataaagttggatgtcatttgagaaactctgggaattggaagtagaacaaattcatactttccctataacttttaatttcttgtcatacattcagaaaacaagagatgtaaaattcataaaactgcttgtataaattcagaaaacgggattataaaagcaaagacaaattgtcttacgattctttgttctacttgagagattcaagtgttggagtaataaaaaataccagggactttcttttttttaataggttaatgccacctaatgtgggcttctcagaatgtgatggcaaacttccaaatatgatgtgggagccaaaagagaccaactggttttacaaaatattaagaacacaaaatttcccaactcatatatttgaatattcctaaaaaataataagtcaaaattgtgttggtgggctgggcacagtggctcacaactgtaataccagcactgtgggaggctgaggtgggaggattgcttaaggccaggagttcaagactagcctgggcaacttggtaagacctgatctctacaaaataaaaattttaaatttaaaaaattaaaaaaaaaaaattagccaagcatggtggcctggcgccttgtagtcccagctactcaggaagctgtgatgggaggattgcttgagcccaatgggtcgaggctgcagtgagccatgatcatgacactgcactccagcctgggcaacagagtgagactccatctcaaaaaaaaaaaaaaaaaagagaaaaaaaattgcattggccaacttggaggcttcagtgttattttgccaagaagaatgttcacttttgtcatctaattttacactgctccttcagcaaactgactttatggagagataaccctgtttacctttagaaagaaggaagttgtggattcctcagtcttactcccattactattggtcattcaacagcccatcttcccagaaggaaagatgtaacctgacttttgcgccagaataagaacaacaaacggaagaaaaaaactgagttttatagtagaagtttgtagttgaatgagcatgtagctcaaaatgaagttaaccacttaaacttgtcatatgggggaccaaaatttcttataataaaaagaactatatctgaaaataaagttggtgtttgtttaatttttctagcctattcaaatcaatctggtcatttatggtactttcctattagagaaaaataaaccctgtgattgtgatgcttaacttaattttctacagtgaatcagttaagtgggcttattttttctgctttagcaagtagataaaccagttcagacttggaacctgaggattctggaaatacacctttcttgagtttttggtttttttttttaaagattctgcagaataatttgggacattgccaggaatcagaatagtttactatctgaagtagtgcattcattttgctgttttttgtttttttgtttttaagacagataagctactttatgactacctctttttctgaagcagggtgggtggaggtcacctgtctcatttgctttgctgttttcagcatctttgctgcttattcttgttgacatggagtggggatgaggggtactacctatttctctagttacaaagtgagtagcatttgtgtttcttaggtgacagttgctaggtagaattgaattaaatatttgaaaactggacttcattcttgtgtgggtgaaatttttaccttctgttgttattgaagaacagagaattattgtcttagcgctctttaatcccaagtgacctttttgtgttaacatttctcaatatcaggcagagatcatatttaaacagtttcaatctcttcctatctgttatgcattcaaataatcattgttctcttgatgcaccaataaccagagagaatctgcccttgttcctgcccctgacaatctgttcacaagagaatatgatgtcagttcaataacagcatacatttcttgactggttgaatttcattaactatttggcttaagaagtttgccccttgatgtctgtgtatttgactgtgcttgggtatattatacttttcttactgattgagcagcattatttttatattctgcttttggaaatgatttacaggtgtcactacattttttttctactacaaataatgaaaaagtacctgcaaagaggctcatcttcctaaaaatggctatcataaatattgcattacaaagtaagaaatagaaattgaaaaatcgaattcatttatcaaagaacatcttttatactctaggtggatgaccagctactggggctctaccattggagacgtcccttccctcatgaaacttgctatctaattctttttttttttttttttttttagagacaggtttttgctcttccacccaggctgggatgcagtggcacaaacacagctcactgcagcctcaaactcctgggctcaagggatcctccttcctcagcctcctgagtagctgggaccataggctcacaacaccatgcctactaatttttaattttcttttctgttctcttttgagacagagtcttgccctgtcacccaggctggagtgcagtggcgcaatttcggctcattgcaacctccacctcctgggctcaagtgattctcgtgcctcagcctcctgagtagctgagactacaggcacatgccaccacatctggctaattttttatgtttttagtagagacggggtttcaccatgttagccaggctggtctcgaactcctgacctcaggtgatccacccacctcggcctcccaaagtgaatttttttttttttttttgtagagatggggtctcaccatcttatgtagctggtctcgaactcccaggctcaagcagtcgtcctgccttgacctctcaaagtgctgggattataggtgcgacccaccatgcccagcctctcattctttttaatgagctcagcttaaaatgtagcaggaatataagtattcacatttttaatactttgcaagatactttggaaattgataatctgaaggttgaagctctcagaactaatgttaacagaattgtccttgggagcaattcagctattcttcatttacggatttagtgattcttgagtcagttgtcttacaccaaatgtaatacatgaatcaggagggtttttctttgtttgctttttgtttttttaagagacgaggtctcactatgttacctgcgctggagggcagtggctgttcacaggcataatcatcatgtattacagacttgaaatcctgagcttaagcgattctactccctcagcctccaaaatagctgagaccatagtgcacacaactacgtctggctctgaatcaggagattttaaatgttctcaaagtatgtaatagctttttcagtcaggcatggtggctcacacctgtaatgccagcactttgggaggccaaagaggaaggaccgcatgagctcaggagttcaagacagtctgaacaacatagtgagaccccttctctacaacagaataagaataaccaggcatggtggtgagcactgtagtcccagctcctcaggagactgagatgggagcatcacttaagcccaggaataggaggctgccgtgaggtatgatcataccactgcactccagcctgggcgacagaataagaccctgtctcaaaaaacaaaactttttccctcctgttaaaatggaacttagatgtgactacatgctctgctgccttctaccatcaaagaagtgcccccttctttttttttttctttcttgttttttttttgagatggagtctcactctgctgcccaggctggagtgcagtggcgccatctcggctcacagcaacctccgcctcctgggttcaagcgattgttctgcctcagcctcccaagtagctgggattacaggcgcccaccaccacgccctgctaatttttgtatttttagtagagatggggtttcaccatattggccaggctggtctcgaactcctgacctcgtgatctgcccacctcggcctcccaaagtgctgggattgcaggcgtgagccactgtgcctggcggaagtgcccccttctatctaaggccaacctctccatttgagctctggatcccatctcctctcatctagtcagggttgtacctgcagttatctcatctctcctgctgcataggtaatttctctctcacaactagattggtcccatcaccatataaaactatctgccttaatataatcctttaaaaaaacgcttgaccccacgtccacctctagctgctacctgattcttttctcccttttcacagcaaaactccttgaaagtgctgtgtgtaattgctatttctactttctcacctttcattctttcctcaactactccagttgggcttttatccccatgatgcctctgaaatagctcttatcaaggttctcaaggagctctattttaccagattgaatagataattctcagttctcatcttgttaaaccctttggcagcctttgaaccagctgaccactcccttcttggatttttttttttaacattgtactcacctgtttttcttcttaactcattggctgttaattttcagtattctgtatggcttccctcctctgcttaactctcctgaataaggttcccaggagtctacttttcactgccttctctgtctacacactcttcctaggtcatctcatccaggcctcatctatacgctgacaactaagaaatctttttctctaacactgactacttctcagagttccaggcttgtatagcctgctgccaatttgatatttccatttggctaatatttactgagtgtttattgtgggccaggctatattctgagcacttcacatgaattatctcacctaaccttcatgaccattgtctgaagtatcactagtattcccatttcataggcaaggaaacacatatacattgaagcacttggatacctaataggtatctcttacttaccatatctaaaaagtcttgactttcttcctcaaaccttttccattcccagtctctttgtttcttaattattccaccaaaaatccagttgctcaggcctaacatgtaagatttatcgtcgatttatctcttttattcacatctcacatctatcccatcagcaaattctgtctgtattacatccaaaataagccctaaattcaactacctctcaacaactttgctaccaaaacctcagactctcccattatagtctcttggttggagttgcttatgttattacctcactaaagtttgtttctcacatagcaacagtaaactctggtatcaaatcctattccttcactttaaacctatctgtgtctccccacactgctaggataaatccagattccttactatggccaacaaagccacacgtaagctggcctctggtcaagcctacttctcgagcattgtctcttctcatctcatccattctgctatatagccacactagcctttttctgtctgtcatgcatgctgtgcctgttgctgtcttggggcctttgcacttgctctcaggctagaacactactccaccaaggtctttatatgtctgactttttctcatttaggcctaaccaggtttggcaagtttttttctgcaaagggccagatggcctctgttgaaactactccactctgttgttgtaagtgcaaaagcaaccataggcaatacagatgctccccaacttacgaaggggctacatcctgaaaaacccatacatcaaaaatgtcataagtcaaagatacgtttaatacacttacaagctcgtcgtaaagtcaaaaattgtaagtcagaccattgtaagtcagggactgtctgtccattaacaactgaacgtggccatgttccaatacaattttatttatgaacactgaaatttgaatttcatatagttttcatgtacacaaaatattcttttgactttaaaaaaatggttaattttttttttttttaattttaacttgcagaacaattgatggtgggccaaattcggcctgtggcccatagttttccagtcttcggtaaactattgccttagagaagcctttcctgtctaccctagcgaatataaccccacagctaacacctctccaccccccactcctgtcaattcttattgtcctagtgtcttttttcttcttagagacagggtttcactctgtcacccaggttggagcgcagtggctcagtcagttcactgcagcctcaaactcttgggctcacatgaacctcctgcctcagccttcctggtagctaggattacaggcgagagccaccatgcccagcccctagtgtcttttatttatttgttatatgtttattttctgtctctccattagattgtagcttcatggggcaggaattttgttagttctttacatgtatcttgagagtcaaacagtacctggcaatactcaataaatacttattgaatgattgagtgacagtcatatttgaattatgcctgtagcctgctatctggtcccccttttttaagtctttcttactctagttcattatatataccatttccagaataaacttcacagttaatgccttctctacatttgagaaccaatggtagcagtctgtattcattgcatttgctttgaccataccatacaagaattaacaaggttctgattatttcatttgtcttctatcttggccctactctggctaccccttttcagcctaatcagtttttaccaatcctccaatccttgcatctgattttcttccccctctctgccccttattattattatttttttttatttttatttttatttttatttatttatttttttttgaggcagggtctcactctgttatccaggctggagttcagtggcgcaatcatggctcactgcaaccttgacctcctgggctctggtgatcctcccatctcagacttctgagtagttgagactacaccacacccagctaatttttgtgtttttctttgtagagatggggtttcacattgttgcccaggctggtcttgaactgctgtctcaagcaagctgcctgcttcagcctcccaaagtgctaggattacaggcatgagccactgtgcccagccttggctacatttttaatacatttttaatttttttttagacaagtcatctccctttgttgcccaggctgatctcaaactcctggaatatcccactgcctcaggcccccaaagtgctaggattatagatgtgagccactgcacctggcctctccctgttactgttaatcagccattgctcattaccttcatgatctattttcttcagagctgcattctttaaaacttttagggccatgcatggtggctaacacctgtaatcccagcactttgggaggattgcttgagctcaggagtttcagaccagcctgggcaatatagtgagacctcatctctactaaaaatttaaaaaatgaaccttttttttttttgagacagagtctcacattgtcacccgggctggagtgcaatggcgtgaccttggtttactgcaacctccgcctcctgggctcaagcaattctcttgcttcagcctcccaagtagctgggattacaggcacctgccaccacgcccagctaattttttgtgtttttagtagagatggggtttcactatgttggccaggctggtctcaaactcctgacctcatgattcgcccaccttggcctcccaaagtgctaggattacaggcatgagccgccgcgcctggcatgcctatatatttctaagtatgtaggtattcctcagaactctgccatctaccctccttttctttcagtactatattctttccctgggtgactgaattcatacacagtttcagcattcatatattcattgagtcagatgtgttttcttcagatcattataccctttagacaacgtggataaacatttcaaattcagatgtctaaaatgatctctcttcccactcctttaaacctgtctcctttctgtgttcccagtcttggtaaataccaccataaacctaatcaacctaagccagacatccacaagtgttttattgattctttgcactcccttaaacctttatatcaaagtcttgtccattttgcctcctaatgtctataggatctgtccttttccccttaatccgtatggccactacagtcattttacaactgttcttcctgcctctacttctctactgctgtcatagcttttggcagcaaaaatccaaatctaatcatacttctctcctaccagagtcactaatctgctatagccttcaggatgaggtctacacgtcctcaaagataaacttcaaactcatgaaggcatataagacctttcatgatacacctcctgccttttttttttttttttttttttttttttgagacagagtcttgctctgtcacccaggctggagtgcagtggcatgatcttagctcactgcaacctctgccttctgggttcaagcgattctccgcctcagcctcctgagtagctgggactacaggtgcccaccaccacgcctggctaattttttttttgtattttttagtagagacagggtttcaccatgttggccaagctggtctcaaactcctgacctcatgatccacctgcgttggcctcccaaagtgctgggattacaggtgtgagccaccatgcctgaccgcctttttttcccttcaatatcttttgcccctttcccacatcagctaaggcctcagtcatccagaactatttttaatttcactccatgccacattcttttgtgtctctgtgcctttgtatgtgttattctctctgcttgcactacactcctcccccaccccccaccagctttatcatccttcgaaagattaagttttcatcctctctgcaatggccttcccgatcctttctccttgagtgggttaattgtctttctgctgtgctcctccagcagtgtcttcctctagcatagcaggcaacatacgatacttcattaatttactcatctgtttttaagattagcaggtccttaaagacagaagctgtcctttatctctgttttcataccgtagcctaggaatggccgatatatattttaatgagtgagtgaatgaatgaattggtacagtctgtcctcccaacctgagggcattctccctatgcatttttttttgagatgctttcaaatttattttattttggtttatttttgagacaggatctcactctgtcacccagcctggagtgcagtgtctcgatcacagttcactgcagcctgtatcttctggacttaagtgattctcccacctcaacctcccaagtagctgggactacaggcacccaccacacccagttaattttttctattttttatagaaagagggtttcactatgttggtctagaactaggctggtctacaactcctgggctcaagccatcctccctcctcggcctcccattgttaggatttcaggtgtgagccacctcgtcctgcccctatacattcttaaaagtaagaatcatattgtgtaattctttgaagtccctcagtattttctactatagtactattaccacagtaggtatttaatgttcttaaaacaagtttattgcatttcttttattttcattttacaaacatttattgggtgccaaatttgtgctagatattagaaatacaaaaatgaataggaaaactgtttctatcctcagagtacacactctaaagaagacaaatgtgtgaacacattttttaaaattccttctgctaatactagtaattatgtgagcatgtctttaaggtgcaacattaagaccttggtattttgaagcttgtagcagtagccacaaggggaaatgtgccagctgaagtgatagctacctggaataaattcccaaaggggaagtggtattctttttaaacttatcgctgccaagatgcacagtttgcctcctggatatttcttcaactttagttgttctcagtaattttgttagttctcctgtggcctcctcatttgatggaatgatatataatggtactagaagccttcaaaacaaagtatttcaaaaaacaagtgcatcaggagtgattttgatactgtctatggtattgatgttattttcaattgattcattgaaatttgttttgtaattgaagggatttgatttttcaaactcttttttttcccccctttgagacagagtcttgctctgttacccaggctggagtgcagtgcacaatctcagctcactgcaacctctgcctcctgggttcaagtgattcttgtgcatcagccacccaagaagctgggattaaaggcatgtaccactatgcccaccaaatttttatttttggtagagacagggtttcaccatgttggccaggctgatcttgaactctggcctcaagtgatccatccatctcagcctcccaaagtgctgggattacaggtgtgagccaccatgccaggccctgatttttcataagactaaaaattttggaaacagaagaatgctaagatatagctgctaaagggcatgtttgagatgcctaccacttaattaagtgctgtgaagtacctaggagtctcttgctagaaaaggaaggtgagggtgtgagcaaagtcatcctaggctgtattcatctgaggccaggagtattggagcttattcaatagaggaattctcaaagtagctctggagcctccatcttagcctggtaggtaaagaactctaggcgggtgatttttgctctgactatggtatattgaaaataatttttttttttttgaaatggagtcttgctccgttgcccaggctggagtacagtggcatgagctcttggctcactgcaacctctacccggccctcccaaccccccgccccgggttcaagcaattctccttcctcagcctcccgagtagctaggattacaggcgggcactaccacgcccggctaatttttgtatttttggtagagacagggtttcaccatgtctctggtcatgtcaggatggtctcaaactcctgacctcaagtgatctgcctgccttggcctcccaaagtgctgggattacaggcttgagccactgcctcaggcccaattgggaagaatttaagggaggaactaaaagctatgcattttagttggggatagggaagaaaacattacagtttatcagttgaaattttatcagatcagtggtattactagaaactgtgtcacatctagttactatagataatttaggtcttgattgcctaaactctgatttctagctctggagtgcctagttacaatactgaggaatggagatatacattgccatcctttggaagaattttgaaatttgaatatttctccatgaaccacatactaatatagaaggaagaatagactttttcttttttctgagatagggacttgctctgtcacccaggctggagtgcagtggcacgatctcagcccactgcaacctccgtcccccaggctcagggatcctcctacctcagcctcccgagtagctggaccacaggcatgcaccagcacacccagctatttttttgtatttttagtggagatgggggtctcaccatgttgcccagcctggtctcaaactccctgagctcaagcaatccacctgccttggcctcacaaaatgctgggtttacagtcaggagacaccacacccagccttcaagagttaagcaaaattttttattccagaatatgaatatgaattacacatagtattttatccttcagtaacattgtttttttagagacaggatctggctatgttgctcaggctggagtgcagtggattcacaggtgcaataataggggaccacagccttgaactcctggtctccagtgatccttctgtttcagcctcccaaatagttgggactacaggcgcacaccaccatacccagctattctttagtgacattttaatgcaactgatttttaaaaggaaggctgaaattgcacactgcctgtctgccttagatacttcttgggagcaggaatcatgtcttactcaatgttgtatctggaacatatagccctagggcaagtgtataaatgttttttgagtgaacaaatgaattaaatattgctttgtttgaaaagttgtcttagtagtacataattccttgaaacacagaatttcatgtatttttctaatataccttatattttatacacaaacattatgtttaatacttatttagggttcacttaggttcttttgtgggagaaatattcctattgcttcgtcactcacagaaataactggccactaaagaattaaagttttgccactaaaataaaatttctgaatattaagatatttatgaataacgtgaatttagtggtaaaggtatgcttggaagctctcaaataactggttaccccagagtggagatgcaggggtcagaaagaaattctacatgtttattatttttacaactagatttcacttaggaagtgacattacatagcttaatttgctgtcttaatcactggaagctaaatatgagttaacagtattttgcagtgctctacttggcaagggtgtttttctatctttgctggtaagaaaatgaaatattggtgatctagtctccaaggacatcagtgtcagcaaggtttaggttttgtggctatactgtcttggaatgctgtgctcatcagagtaggccaagttgaaaggaaaagtgtgtgatgaatggttgcctgagcccagttcccaggagtccctagtcatgtatagcatgatgtctcctgtaccctctctcttcagggctgtccaggcttatgatgccacgatgccaaatgtggatttaattgtagcttcttttgtcttttttatacacatattactgtagtcttttgatttctagataagtttaaatccttgggaagccaacactcttaccttgtttccaacctccagggatcccatgtgcttaaggagagtgatggagcaagatgagaagcctgttgctcatgatagtgcagtgaaaggaggacttttttgcagcaccctctttatttatttatttatttttgagacggagttttgctttatcacccaggctggagtgcagtggcgtgagcttttggctcaatgcaacctctgcctcccaggttcaagtaattctcgtgcctcagcctcccgagtagctgggactacaggcgcgtgccaccataactggataatttttgtatattttgtagagacggggtttcaccatgctggccaggctgatctcgaactcctggcctcaggtgacccacccatctctaccttccaaagtgctgggattacaggtgtgaaccaccatgcccggctgcagcaccctcttgtagccttctttcccagtgctttctcaacttggctttacttagtttttttgttttgttttgttttgttttgttttgttttttagggctcttacataggcttggaagttccaagttagaagactggagctctttaacataacaatgacagcttttgtttttggctaagctgtccggattatttaaacaatgggtacttattttttaaagcatgcttcaagaaatcaatcaatatttcaagtgcaaagaaagttcttgggtaaaagtatagttcattttgactacttatttttatttatttatttattttttgagacagagtctcgctctgtcgcccaggctggagtgcagtggtgcgatctcggctcactgcaggctccgcctcccgggttcacgccattctcctgcctcagcctcctgagtagctgggactacaggcgcccgccatcacgcccggctaatttttttgtattttttttagtagagacagggtttcaccgtgttagccaggatggtctcgatctcctgactttgtgatcctcccacgtcggcctcctaaagtcctgggattacaggcgtgagccactgcacccggcctgactacttattttttatttccttattccaagtacaagaccagaaggaaaacgaattaatgcttcctgtcattttggaaagtacttagaaactttaaatattggcagttaaactgcctgacagctcagtggaactcttgttttggaatacattgcagttaggattatatagttacattttgtaaaagtttgaaatatataaaaatgactcattaggttgttaataatgaacctaacagtgtgtatctcttacatttatctttattttttttttttaaataaagatggggtcttgctatgttgcccaggctggtcttgcactcctggggtcaagcaatcctcctaccttgtcctcccaaagtgctgggattacaggcatgagccactgcacccagcccatttcttttaaagattaataactttttattacctgttgaatactttacctattgattattatatgtatagttgcttgagctgtcaatcattgtagcatttggaacataaaatgcgtgtatttagcaatgtagtcccctagtaagtgttgggaaatccccagatgtctttgtgaaatgcatagattagcaggttgttccacgagtataattcaggaaaagaatgaattaatcagaaatttgaaggatctgaaaatggccatcatgtgacttttacagtagctaaaagaatagcaatttttgtactttagacaacttattcaattcctttaaatatttattgttttatattgtatctattatggtaggaaaactattctacagccagtttagacacttaggttctttgtagctaactgtgtgatcttgggcaagtcatttggccttttagagcttcattttcttcaaacacaacaataagaactactatgtgaggggacttcaaagaaaactcatggaaaaatacatattatgaaaaaactgcagaatttcaaaattttgtatgcaccaaaataaacttgcactaacttgtcataacatatctgaacaggatgtagtttgaggcactaagaaggataagacatcagtttgaaaagagcccctatcagagcaacataagttctgctaaaattgaagcaaaaacaaacataaaatttatggtgaagctgggtgaaagaatggtgaaatcattgatgctttacataaagtttatggggacaatgccccaaataaataattggatggctcattttaagaagggacaagatgatgttgaagatgaagcctgtagtagcagactgtccagtttgcaaggaaaaaattcatcttgttcatgccgtaattgaagaggaatgatgattaacagcacaaataatagccaacaccatagacatctcaattggttcagcttacacaattctgactgaaaaactaaagttggctgggcgtggtggctcacgcctgttatcccagcactttcagaggccaaggtgggtggatcacctgaggtgaggagttcgagaccagcctggccaacatgacgaaaccccatctccactaaaaatacaaaaataaccaggtgtagtagtgcatgcctgtagtcccagctacttgggaggttgagacaggagaatcacttgaacccaagaggcagaggttgcagtgagtgagccaagattgtgccattgcactccagcatgggtggcaagagggaaactctgtctcaaaaaaaaaaaaaaaaaacctaaagttgagcaactttctaccaaatgggtgccaaaaccattgcacccaaatcagctgcagacaagtgtagagcattcaatggaaattttaaacaagtggcagcaagatcctgaagcatgtctttgaagaattgtaacaggagatgaaacatggctttaccaatacgatcctgaaaacaaagcacaatcaaagtaatggctaccaggaggtagaagtggtccagtcaaagcaaaagcagactgtttaagagcaaaggtcatggcaacagttttttggggatgctcaaggcattttgcttgttgactttctggaggaccaaagaatgatagcatcagcttatttgaaagtgttttgagaaagttaaccaaagctttagtagaaaaatgcccaggaaagcttcaccagagtcctgctccatcatggcaatgtccctgctcattcctctcatcaaacaagggcaactttgtgagaattttcatgagaagtcattcagtatcattaagtatgctgatttgtctcctttgccttttttgtttcccaatcttaaaaatctatgaaggaggcggagcatctaggctgaggcaggagaatcgcttgaacccaggagacggaggttgcagtgagccaagattgtgccactgcactatagctaggtgacagagtgaaactcttatcttaaaaagaaaaaaaagaaatctatgaagggcacccatttttcttcagttaataatgtaaaaaagactgcattaaaatgtttcagttcccacgacccccagttctttagggatgggctaaatagctggtatcatggcttacaaaagtgtcttgaccttggagattatgttgagaaataaaatttatatttttaatttttatcttttaattccattttccatgaaccttttgaagtcccatcatatgtatgttgcctatagctttccaagtgatttcacataaattatttattccttacagtgctcaaataaaaaatgaaattgagggatagatacagtaagtgagttgtctaagattacatagtctgagagaatcagactgagaccctaaaccaacccttctctccccacatccagcactctcctcactggcatcacgtatgagaagactggattggccccctctacaattataatattctatgatttttttgtttctgaagtgatttgccattacctattttatttgctttttcctcaaaatatattttagggttactatttttaatgtcttttttttctgcctgaaagtacattttaaaagttaacagtatggaatttcattattgtgataagattttatattaattgtgctgttaggagttttggctgtttttgttttgttttgtttttttggtaacattgtagcctacaagtgtaaaccctgaaaatgattccagaaatttatttggggttcagattcacatgttgtaggttagttatatactaacttgttttaagatgaagagagataatttttttattttaaaattacttttagattttttttagattgggaggccagtatgggaggatcacttgagcccagaagtttgagaccagcctgggcaacatagtgagaccccgtctctgtaaataattttaaaattagctgagtgctggtacatgcctgtagtcccagctgcccaggaggctaaggcaggagcattgctagagcccaggagtttgaggctgcagtgagccgtgatcacaccactgcagtacagcctgagtgacagagtgagcactggcaaattttaaaattttctgtaaagactcactatgttgcccaggctagccttgaactcctggcctcaagcagtcctcccatattggcctctcaaggcgctgggattacaggtatgagctactgtgctggccaagagagaatttttcttattcacaaataatgttcacagtaagaatttacttaaaatttttttaaagtaaaaagaactggctgggcacagtggctcacgcctgtaaatcccagcactttgggaagccaaggtgggtggatcacttgaggccaggagttcaagaccagcctggccaacattgcaaaagcccatctctactaaaaatacaaaattagccaggtgtggtggcacacgcctgtaattccagctacttgggagggtgaggtatgagaatctcttgaacctgggaggctgaggtggcgccattgtactccagcctgggcgacagagcaagactctgcctcaaaaaaaacaaaacaaaacaaaacaaaaacaacaaaaaaccaacaaaaaaagaacttacgtgtaagaatttaaattagtgatgaaagaagaaactgtaaaaagtactccagtaagccaggcatagtggtgcatgtatgtagtccgagctatgcaggaggctgaggcaggagtatcacttgagaccaggaattaaagaccagcctgagcaaaatatgtaattaaaaaaaaaattactgtagtctgtgttccttaaatttaggtttcatacattcttagaattataatactttttcatggctgggcacagtggtgcatgcctgtaatcccagcactttgggaggccgaggtgggcagatcacttgaggtcaggagtttgagaccaacctgcccaacatggtaaaaccctgtctctactaaaaatacaaaaatgagctgagcatggtgacaagggcctctagtcttagctattcaggaggctgaggcaagagaatcgcttgaacccaggaggcggaggttgcagtgagctgagatcgcgccactgcactccagcctgggtgacagagcaagactccgtctcaaaaaaaaaaaaaaaattataatactttttcagatgtctttgaagaggagaatttcagccttttcttaaatagtccaatactttaatcttagcaatctcagagcaaaagcctttttagatgccagtaagacttttctctcagttgcctagtatgcaaaggctgggccttaaatgttttgctcctctaaagcatttaaatttaagagatgaacctgctaatttgtcctaaaagttatatatgtcttttaatatagtcatggctgaaaaatggctaagacagttagcacctgactctagttttaaattaactgagaaaataatccttcagaaaatcattgatgttgtccacatacatgtgttcttacctctcgagaggaaaatgttaatgcttttgtcattggaactcagtttgggacttaccactataaattggaggttccagaatgtctgttcttcattccttattttgttcttgttttatgtggattttgtttctggaatctgaaattctatcattctgtgtctgtctctggaaagaactcaatctctgaatcattgaatttctattaatcagtttgtttaaatagaccatctttcttgagaacttgtgcaaaataggttaaacaaatcctttttttttttatagagcaggttaaaattagaggtaagcagaagcttttgctttttgtcctttccaactataactgaaaataggatgcttccctaagttttagtaaaggatttcatcctatatgcagtcaattcatgatccctttcacaaacgctgctgcccaccattaagtctcttatcacaggcatttttaaaattataccataaaatgcatgttgagactctctggatctcaaatgtacagaaatcacatctaaatgtcaattcctgagttaaggaactgacaattatggcactttcagtctctattaatatttagaaggcaagagattattatattgtttatattactccttatgtgtctgtagacttaaatactttttgaaaagcatttgtttgttgtattggggctgtatgtttctgccattatacttatttgcttacctgatttaaagttgtcctttaattgttttgggctgtatctatagtttgaaattaggactatcctctgtgtactatgcaccaaagatgacatttcaatgcattgttcagttactacacagctcctatttgtctgtaataaagctgtatggctgggtccatttatttcaatattagttattttatagtatccattggaatgatgataattaatatataaaggcaacttttccaaattcatttgtgtctcctctgggcatttctttgggatgtgtttgtatgcacgtttttgcttctgattttaaaataattttcctttgttgtaggatgagcaattcttaggttttggctcagatgaagaagtcagagtgcgaagtcccacaaggtctccttcaggtacggccaattaagtgcatggtgccttttaagttttgtttgttaggagattgtggcttcctcttgccttctttacatgtaaaggatgctctaccatacttgggttaggaaatggctgatgagctagacttctttttatttatttatttatttattattgttatactttaagttttagggtacatgtgcacaatgtgcaagttagttacatatgtatacatgtgccatgctggtgcgctgcacccactaactcgtcatctagcattaggtatatctcccaatgctatccctcccccctccccccagctagacttctttatgggactcttatctatcaggccacattgggtttattctttctctctgggaactacttggggcatgggaagtaggtttccacagaattactgggaaatctggtaggcaaagtgaaggtaacctagtaagagtatcctcagatttacacattttgtgttatgtggtagtgtatatgtctttgggaataatttggccattattttttttggatgaaatttggtccactattgtcaaagaaccaaaaacaaaatattggcattatgtgaaacatttttacctgattcttgaaaggctgtattaaaataaaaaaatggaaaattagcaatatttgtcattattctcaccaacaaaatatctagaatatcttgaaattctagacttacaagcagtttcctaagagaagaccctcaatggaaataacatttaatggcttgcctaattcagttctgtataggagaaagctatgtatcttttgatgaaaatgcattccccatctgtgctgccattctgacttcatatatggttttctttgattttatgtggatagacactccagctaaatatgatattgttagctgtttctgctttttgacattgacttagcttgtgatgtgtgctagcattagggtctcacttaagagtcatcatatattatcatctaattcaaacatccaagttgacagtttttcttttcttaaagaggagtggtattgtcattctagttgggggcagttggccagtagtgtcccagtatctgtgctattcagacagtagcagtgttctctttaacatgtgatgaagtcttaaaacttcatataggaaaggaattagagagatcatctgggatttttgtttgtttgtttatagatgaaaaaatgaggtccatgaaatacatgagtaatgatttataaccagtttgagagttctttggatatgttgtggatcagggaagttagcagcagtgctgggactcttctctgttctgctgcttctacttatctaccaaaagagttttttaaaaagtaggatagaagaggttttcagaattgataaagccctctgattggccaggttcaagtctaccacaatggtaaggaatcttttgatgtatttccgggcaggagttgttttgtttgtttgttgtttttgtttttgtttttgagacggagtctcactctgtcacccaggctctgggcaggagttttattttgttaattcacaactttttcatggtagtttcctcttaagttttttttcatgactaccagtctaccttgaatgttgtcttgttttctaagaaaccatctcgatatgcttcattatttgagaaatgagacatggtttctctgctgtctcctagtttattacctttgttgtaattaggatatgttgagaaaggagctgtgaatccttaatctattaaaggaagtctcataaattaattgatgaggaatgcatttatatttagaaagctcaacaataaaacctttgttgacttctgttctgttagcaagcagttccattgtaaaaatgttcatctcttttggtgcctattaagggaagttttagtctcagaagaatgttatcaaaagggaaaagaagatttgataaaatagcctagtcttactactttttaaaatacaggtttatacaaggtgttttagaaacagtcttgttttcttgaatggcttgaaaagcagcaaactgagcttatttataaattggcaaattccttttatttagaatagaactttgatttaataagttgtcattttgctgttgacatcagttaaggttaaatctttttgcaacttgagactagctcaagaacctctaagcaggggagtagatttagtggacacattatgtcacttcactgattagttcacatgccactgagttcagtggtcttattctgatgtgtcataaatgaacatttttctattcagtaaaactttcttagtctactttggcaaaacagattgaaatatgggactctgagctgcccaaggagttggtatgttgatgattgaagagcagcgtattcaaatttgttcaaagccagaattctgaattgaaaagatgggatgactaactagaagcatattcttaaatgttaatcttggtggctaggatatggcgaggaagttcagatgttttttctttacaattcctttgaattcagaaaaaaccttcttgctcatctaaaattgtaagaaaatcagttttgtggattaattgttcaactgaaaactttttattatctttttgtatcaaaaaagtaattaaatgttctttcaggtggaatgttatttgctgacttctttgaggcaaattttgggtgaaaagaaactaagcacaattaagatgtttgattgactcattagactcaagttgaactcagtacaaaatggccagtgctaagttatattcagcttagttaaaacctaaactacacagctaaatatatgctcttcattgtttaatttctatacacagttaaaactagtcctcgaaaacctcgtgggagacctagaagtggctctgaccgaaattcagctatcctctcagatccatctgtgttttcccctctaaataaatcagagaccaaatctggagataagatcaagaagaaagattctaaaagtatagaaaagaagagaggaagacctcccaccttccctggagtaaaaatcaaaataacacatggaaaggacatttcagagttaccaaagggaaacaaagaagatagcctgaaaaaaattaaaaggacaccttctgctacgtttcagcaagccacaaagattaaaaaattaagagcaggtaaactctctcctctcaagtctaagtttaagacagggaagcttcaaataggaaggaagggggtacaaattgtacgacggagaggaaggcctccatcaacagaaaggataaagaccccttcgggtctcctcattaattctgaactggaaaagccccagaaagtccggaaagacaaggaaggaacacctccacttacaaaagaagataagacagttgtcagacaaagccctcgaaggattaagccagttaggattattccttcttcaaaaaggacagatgcaaccattgctaagcaactcttacagagggcaaaaaagggggctcaaaagaaaattgaaaaagaagcagctcagctgcagggaagaaaggtgaagacacaggtcaaaaatattcgacagttcatcatgcctgttgtcagtgctatctcctcgcggatcattaagacccctcggcggtttatagaggatgaggattatgaccctccaattaaaattgcccgattagagtctacaccgaatagtagattcagtgccccgtcctgtggatcttctgaaaaatcaagtgcagcttctcagcactcctctcaaatgtcttcagactcctctcgatctagtagccccagtgttgatacctccacagactctcaggcttctgaggagattcaggtacttcctgaggagcggagcgatacccctgaagttcatcctccactgcccatttcccagtccccagaaaatgagagtaatgataggagaagcagaaggtattcagtgtcggagagaagttttggatctagaacgacgaaaaaattatcaactctacaaagtgccccccagcagcagacctcctcgtctccacctccacctctgctgactccaccgccaccactgcagccagcctccagtatctctgaccacacaccttggcttatgcctccaacaatccccttagcatcaccatttttgcctgcttccactgctcctatgcaagggaagcgaaaatctattttgcgagaaccgacatttaggtggacttctttaaagcattctaggtcagagccacaatacttttcctcagcaaagtatgccaaagaaggtcttattcgcaaaccaatatttgataatttccgaccccctccactaactcccgaggacgttggctttgcatctggtttttctgcatctggtaccgctgcttcagcccgattgttttcgccactccattctggaacaaggtttgatatgcacaaaaggagccctcttctgagagctccaagatttactccaagtgaggctcactctagaatatttgagtctgtaaccttgcctagtaatcgaacttctgctggaacatcttcttcaggagtatccaatagaaaaaggaaaagaaaagtgtttagtcctattcgatctgaaccaagatctccttctcactccatgaggacaagaagtggaaggcttagtagttctgagctctcacctctcacccccccgtcttctgtctcttcctcgttaagcatttctgttagtcctcttgccactagtgccttaaacccaacttttacttttccttctcattccctgactcagtctggggaatctgcagagaaaaatcagagaccaaggaagcagactagtgctccggcagagccattttcatcaagtagtcctactcctctcttcccttggtttaccccaggctctcagactgaaagagggagaaataaagacaaggcccccgaggagctgtccaaagatcgagatgctgacaagagcgtggagaaggacaagagtagagagagagaccgggagagagaaaaggagaataagcgggagtcaaggaaagagaaaaggaaaaagggatcagaaattcagagtagttctgctttgtatcctgtgggtagggtttccaaagagaaggttgttggtgaagatgttgccacttcatcttctgccaaaaaagcaacagggcggaagaagtcttcatcacatgattctgggactgatattacttctgtgactcttggggatacaacagctgtcaaaaccaaaatacttataaagaaagggagaggaaatctggaaaaaaccaacttggacctcggcccaactgccccatccctggagaaggagaaaaccctctgcctttccactccttcatctagcactgttaaacattccacttcctccataggctccatgttggctcaggcagacaagcttccaatgactgacaagagggttgccagcctcctaaaaaaggccaaagctcagctctgcaagattgagaagagtaagagtcttaaacaaaccgaccagcccaaagcacaggtactcttttccaccttgcctattaaaactaacagtttattgagccctttctatgggcaagttttaggctaagtggttcaattacatccagttatgagaaccaagaaaagtatggtggaggcagtggtatttgcagtagtccttcaaggaccagtaggattttgataggtagaaagtggcaggacataacattctaagtagagggaacagtgtgggtagaaatggaaaagtaagaaatatatttgaggaatactggatagctggattggcatctgtggaaaactggtgaactaaggctgaatgaactaaggttgggactatatcacagaggatgctgagttgtttgtaccttataagtttgatgtaattaaaccagggacttaattgtaaaggtacattttaatagtcaaattgttttactatccccgatagaatagaaaaccggaggggagcattctcttcctctgagtagtgagggattggagcaatagataatatgtttttgcagaatacaaatgagaagtactggccaggtgcgatggctcatgcctgtaatcccatcactttgggaggccaaggtgggcggatcacttgaggtcaggagtttgagaccagcctggcctggccaacacggtgaaacctcatctctactaaaaaaaaaaaaaaaattagctgggcgtggtgatgcatgcctctagtcccagctactggggagattgaggcacaagaatctcttgaaccccggaggtagagatggcagtgagctgagatcccgccactgcactccagcctgggccaatagagtaagtctctatctcaaaataaataaataaataaataaacaaacagattagaagcacttagccttgagccatggaacaggaaagctatagaattcagttagttaagatgatgccaaatatttttacaaagaccagcatttttgttttttttttattgttttgtttatttgtttaacaaagtaagctagtcactggccttttctgagaaaagttgctgatctttagggttttaaaaaaatcgtcatgtagtagatgcctatttatggcagcaaatcaggttaggttaagatggccataaacttatatttgtaatgttattcacgggctgggtacggtggcttacgcctgtaatcccagcactttgggaggccgaggcaggtggatcacgaggtcaggagatcgagaccatcctggctaacacggtgaaaccctgtctctactaaaaatccaaaaaattagccagacatggtggcatgcgcctgtagtcctagctactcgggaggctgaggcaggagaatcgcttgaacccgggaggcggaggttgcagtgagccgagatcacggcactacactccagcctgggtgacagggcgagactccgtctctaaaaaaataaataaataaaattaatgttattcaacctagggccatagttacatttactaattctgccagttgagaattgtagcaggaatgtgatgggacttatttttaacaccatgttggatgtttttgtgataggagcagcggctctttaaaatctgagacatttcttttggagccttttatactttctcttttttttgagacggaatttcgctcttgttgcccaggctggagtgcaatggcgtgatcttggctcactgcaacgtccgcctcccaggttcaagcaattctcctgcctcagcctcccaagtagctgggattacgggcatgcaccaccacgcccagctaattttgtatttttagtagagacagggtttctccatgttggtcaggctggtctcaaactcccgacctcaggtgatctacccgcctcggcctcccaaagtgctgggagttgcaggcgtgagccaccacctatactttcatttataagttatttcacccctacttctctgatgatcaaggaaatataagaaatagtttttggttagataagccgtatttataccacactgaactttttgataatatagactggcagcttgaattttgaggggaatttaaaatagtagtataattgggaatagaagcttagttgtttgtttgtttttaagatagggtctcactctgtcacccagggtggctcaagtgatcctcttgtcccagcctcctgagtagctagaactacaggtgtgtaccaccacgcccagccaatttttaaattttgtgtagagatgggttctcgctatgttgcccatactggtcttgaactcctggcctcaaatgatcttcccacctcaagctgttttttattttttgattagaggcctttttttgtgctgccaattaggatacagtaatagttgatttctgttttgatatgatttatcagctgggaataattagagttgtgtgttttgattctaaatcatactgaaattgattaagtataccttggcttcgttcagttataatttcaacatgtatggttgttattgtttttggattgcctcatattcagggtcaagaaagtgactcatcagagacctctgtgcgaggaccccggattaaacatgtctgcagaagagcagctgttgcccttggccgaaaacgagctgtgtttcctgatgacatgcccaccctgagtgccttaccatgggaagaacgagaaaagattttgtcttccatggggaatgatggtaggtcaagaaggtcaatcttggagtcggaacagacttttgatttgtttgttgattattctggggatgcccagtaggctcttcatagttagtaggtcctctgaaaaacagatggcaagaggggattaaatacatgaggattttattagaagaaatgcctgagaaggaaaacggggaggtagccagggaaggctgggagagctgtcagactgtgttgcccatctcacccccatgaaggagcaggggaaggaaggcagaatcttcctagactgctgtgcaggtgagaaagatttggcaaagctgtccaggagtctttgagtaaaagtggactgtcaggggagtgggaggcacattctcatggctgtcatatagttcttaagtgcagagtagccactcagaacaaatttagaggtttgaagaatccttagaagcatttggtttctattctcgattttagattagacttttgttttcagtatttggaattttgctttcatcaagatgcaagttattggctttttttttttttttttttttttttttgagacggagcctcattgtgttgcccaagctggagtacagtggtgcgatctcggctcactacagcctccacttcccaggttcaagcgattctcctgcctcagcctcctgagtatctaggattacaggcatgtgccaccatgcctggctaatttttgtatttttagtagagaggggttttgctatgttggccaggctggtctcaaacccctgacctcaggtgatctgcctggctcagcctcccaaagtgctaggattacaggcatgagccaccattcctggccaagttattggcatttttaaacatttaaataattatttaaaatagattctgagttctgtatataaatattttattttaatgtatttcatttttggagtaccaattaaaaccaggtttgaattcagtactcccttggaactaatgccacatttctttaacagacaagtcatcaattgctggctcagaagatgctgaacctcttgctccacccatcaaaccaattaaacctgtcactagaaacaaggcaccccaggaacctccagtaaagaaaggacgtcgatcgaggcggtgtgggcagtgtcccggctgccaggtgcctgaggactgtggtgtttgtactaattgcttagataagcccaagtttggtggtcgcaatataaagaagcagtgctgcaagtaagtgggtgtttcactctgagatgttgacctctcaaccataaaggttgcttatttatccctagtttgttgcagagatacatcaggaaactgaatgtggttgtaattgagttgcaagacttgttacagttagattttgtggtgtgggctgtgcttaaataagaaatactctggggccatgctgtcattaatagaatgttctgcaacaatggaaatgttctattggaatagtagacaacaataatggaaatgtttagttcagtatgcagccattagccacatgtggctattgagcgcttgacatgtgattagtgtgactgaggaaccacactgtttatttcgtttaactttagccatgtgtaactagtggctaccatatcagactgtagctctggaggatttctacttaaaacctgacaactttatgtataatttttgttgggtctactgaaattatgttgacccaacaaaattatgacaattcaggaaacattggagataccttgcataaatatctgtgctttctcactctctcttagaatatgttcatgcatatggaatttttttttttaagagacagggtcttgctctgttgccaggctggagtgcagtgacatgatcatagctcactgccaacactgaactcctaggctccagtgatcctcctgccttggcctcccaaagtactgggattacaaacatgagccacagtgcttggcctcatatgaaatttctttttttaagaagttttgttttaatttttatgggtacatagtaggtatatatatttatggtatacataagatgttttgatacaggcatgcaatgcatcataatcatatcatgcagagtggggtatccattcccttaagcatttatcctttgtattacaaacaatccaattatactctttcagtcatttttaaatgtacaattaaattattatttactacaatcaccctgttgtgctatcaaatgctaagtcttattcattctttctgattatttttttgtacccattagccatcccctaatatggaattttttatgtggaaatttttattactctactttttctcctcttttttagtcagtttgtggaggtactttctgccatctggcatactttatttaaaatagatcgagatagtagcataaacagaaattttggtgattaagcatcttgtaaactactggcacaaataataggtgtcaatagatatttgctgaatgagtgagtcacatgcaagtgattaatataaagaacagttgggagaaatgctacattatttacttcaggggagataatttctaggagacaagaagtagttctgtgctttggtttggtctgaccttaaacaagaatcttgtctcagtcctgttagtggaaagaagtaaactaattcacagatcacaaaaaagtacatgatagcaagataaagttgcattaaatttaagagttaaagtggattcagtgcaattgtagacttcagattacatttgaattttattaaatctaaatttaggggtgaagtatatatcaaagccaccagatttaattatagcattatagtggtagacaaaggagttgtttgataattttagtctgttttgtgttaagattacttgatggatattaacatcgtaagagagtaggactgatgcgactacaagaaatactgactgatcattttctgtgtggtgctagtcagtgttggattacaagaaatttgagtcccatttcaaaaataatttgatatttgctccttttagatcctaaaggtaggtgaaattgctgatccagggattcaaaggctcagatttaatctgagtaatgagcagtccttttttcaactataaaaatgtgaacctgaatacagattcactgattgttgcagacaaaatgaacacttgtttcagtgcttttcttctaaatttaatttgtttcatggtttattcgttgttttcctaggatgagaaaatgtcagaatctacaatggatgccttccaaagcctacctgcagaagcaagctaaaggtagtgttgttaaaaaggtcttcccccaaatgctccttgcttaaatggtgtatagttgtatacacccagtagaagagaatacttttttttttaaagtacaactctttctcagggagtagattgttgaagctaggtaataggtacatgggggttgattggactatttcctgtattgggggatatttttgaaattttccataataaattttttaaatttatataaaaatcatagttcattatatttcctagagcaataaagtatacctatttcacctgatcaacttggcattaactttctttagcctttcaatgctaacttttaactgcaggaaactgagaatgttgtgtcacatttctacgcttctattttttaaatgtatttttttaacttatttttaatttttgtggatacatggcaggtgtatttatttatttgtttattgagacagagtctcactctgtctttcaggctggggtgcagtagcatgattatgactcactgtagcttcaacctcccacgctcaagccatcctcccacctcagcctccctagtagctgggactacaggtgcgcaccaccacgcccagctaatttttgtaaattttttttgcagagacacgattttgccatgttgcccaggctggtcttgaactcctgggctcaagcaatcctctcgccttggcctcccaatgtgctggaattacaggcatgagccaccactgcacctggccagcaggtgtatatatttatgggggtacatgagatatgttgatacaggcatacaatgggtaataatcacatcagggtacatgggatgtccattacctcaagcatttattctttgtgttacaaacaaactaattatactcttgtaattatttttaagggtacagtaaattattgttgactgtaatcaccctgttgtactatcaaatactagatctcattcacttctatctagctatatttttgtacccattaaccatccccactttccccctcaacctcactacccttcccagcctctcataactatcattctctctgtctctatctccataagttcaattgttttaatttttagctcccacaaatgagtgagagcatgtgatgtttgtctctctgtgtctggcttatttcacttaacataatgtcctctagttccatccatgttgtttcagatgataggatctcgttcttttttatggctgaatagtactccattgtggatatgtaccacattttctttatccattcatctgttgatggatgcttagattactttcaaatcttggctatcataaatagtgctgcaggaaacatgagagtgcagatatctctttgatatactgatttcctttattttggtatatacctagctgtgggattgctggatcatatggtggctctgtaattctattttaaataaaattattctcactatagacagatgatgttgttgtgtttttccctcagctgtgaaaaagaaagagaaaaagtctaagaccagtgaaaagaaagacagcaaagagagcagtgttgtgaagaacgtggtggactctagtcagaaacctaccccatcagcaagagaggatcctgccccaaagaaaagcagtagtgagcctcctccacgaaagcccgtcgaggaaaagagtgaagaagggaatgtctcggcccctgggcctgaatccaaacaggccaccactccagcttccaggaagtcaagcaagcaggtctcccagccagcactggtcatcccgcctcagccacctactacaggaccgccaagaaaagaagttcccaaaaccactcctagtgagcccaagaaaaagcagcctccaccaccagaatcaggtgagtgaggagggcaagaaggaattgctgaaccacaagtactaacaaaaaagcactgatgtctcaaacagcatttgaaagcaggaaatgtatgatttgaagtcttcagttcaagaaaatcagctctctttctaactattatgtttaataataaagaaacagaaacaaaaaaaacagttaaattggaggtattgttttaatttcctgttcgaagcctagagtttaaatagttttttttttttttttctaatggccctttcttcacaggtcagtcagtactaaagtagtcgttgccagcatctgactgcaatttattctgaattttttaggtccagagcagagcaaacagaaaaaagtggctccccgcccaagtatccctgtaaaacaaaaaccaaaagaaaaggtgaggagagatttgtttctctgccatttctcagggatgtattctattttgtagggaaaagccttatccttgacttctatgtagatggcagtggaatttcttaaaattaagaaacttcaagtttaggcttttagctgggcacggtggctcacgctggtaatcccaacacttagtgaggctgaggtgggaggattgcttgaggccagcagttcaagaccagcctgggcaacatagcaagaccctgtctttatttaaacaaaaaaaaaaaaaagaagaagaagaagaagttagccaggcatggtggcagttgcgtgtagtcccaggtactcaggaggctgagatagaaggattgtcttgagcccaggaattcaaggctgtagtgagctatgattgtaccactgcagtccagcctgggtgacaaagcaaaacactgtctccaaaaaaaatttaggcttggcaaggcgcagcggctcacgcctgtgatcccagcactttgggaagccgaagcaggcagatcacttgaggtcaggagttggagaccagcctggccaacatggtgaaaccctgtctctactgaaaatacaaaaattagccggttgtggtagtgggtgcttgtaatcctagctacttgggaggctgaggcaggggaattgcctgaacctgcgaggcggaggctgcagtgagccgagattgcatcattgcactctagcctggacaacagagctagactccatcccaaaaaaaaaaaaaaaagtagccgggcacggtggctcacgcctgtaatcccagcactttgggaggccgaggcgggcggatcatgagggcaggagatcgagaccatcctggctaacacggtgaaaccctgtctctactaaaaatacaaaaaaattagcccggcgaggtggcgggcgcctgtagtcccagctactcaggagagtgaggcaggagaatggcgtgaacccggggggcggagcctgcagtgagccgagatcgcgccactgcactccagcttgggtgacaccgagactccgtctcaaaaaaaaataaaaagtttaggctttagcctgtttcttttttggtttcttccttgttgcttttcccttctttgtggccccacatgttctagcctaggaatctgcttattctaaaggccatttggcgtaattattttttgaccccaacatcctttagcaattatttgtctgtaaaaatcacccttccctgtattcactatttttatttattatggataaagagatagtgtggtggctcacatctataatcccagcactttggggggccaaggcgggaggatcacttgagggcaggagctggagaccagcctgggcagcacagtgacacacagttgctataaaaaatttaaaaatcaactaggcatggtggcatgcacctgtagtcccagctactcttgagaagctgaggcaggaggatcacgagcccacaaggtctaggctgcagtgagctgtgactgtgccactgtattgcagcctaggcaacaaagcaagacccagtctcttttaaaaaaaaattcaaagattatttgtttatgttggaaacatgttttttagatctattaataaaatttgtcatttgcattattatctgttgcaaatgtgaaggcaaatagggtgtgattttgttctatattcatcttttgtctccttaggaaaaaccacctccggtcaataagcaggagaatgcaggcactttgaacatcctcagcactctctccaatggcaatagttctaagcaaaaaattccagcagatggagtccacaggatcagagtggactttaaggtaaaggtgttcagtgatcataaagtatattgagtgtcaaagactttaaataaagaaaatgctactaccaaaggtgttgaaagaggaaatcagcaccaactgggggaatgaataagaactcccattagcaggtgggtttagcgctgggagagctttggtcagtgttgttaggtcactgtttgtgaactgactgcagaacatacataatgaaacattcctatccatcctgagcagtatcagaggaagtaattccttcacatggaaagtatcaaaccatgatgattccttgagtcagcaaaactgtaagagaaattcaatcccagtgtattttcgcaatatattcaatatgaattgaacaactaggtgagccttttaatagtccgtgtctgagattaaaactttttaaagcagcagttatttttggactcattgaaatgaaatactctgacattgtgatgtcacactaattttatgcttttcatccttattttccatccaaagttgtgtaattgtaaaactttcctaagtgacctttctctctccacaggaggattgtgaagcagaaaatgtgtgggagatgggaggcttaggaatcttgacttctgttcctataacacccagggtggtttgctttctctgtgccagtagtgggcatgtagaggtaaggcatcctgcttctttgtaccccaggaagtacataaattatttttctgtggatgaaattactatagtctgttttgttggtatttagcaggtactattccctgtttaaaccagctaaagaaatgttttgaagtattttagagattttaggaaggaatctgctattagagtagcaaagttattgagagtgaaaagatcaataatcccatctctcttaaattcagtctttattagagttctgatctttctgttagatgtctaaataagagaaaaaattatacagtggtctattaaaagggatgctattgatggttattttatattgtatatcaaagcctcttcatctataaggagctcttaccaattaataagaaaaaggaatgacatccagaaaaaaaaataggcaaaagacagaaatagataattcacaaaattagaaataaatacatgttgggtggcagggggaggtgaagggagggtgtctgttttttagccctctagtgaccaaaaactggaaattaaagcatgataaaaaaagaatcctgaataaatggggactttctgttggtggaaagaaatatagattagttacaatctttctttctgagggaattatttggaaatatatatctatctttaaaataggtatatcctctaacatagcaattgcacttcaaacacttatggatataattagataaattggcaaatctgtagatataaagaagtgttcatttcaatattgctcataataataaaaaactggaaacaacccgaaagtccatctatagggagcatgggttaaaataagcatagggcatatagctgggcacggtggctcacgcctgtaatcccagcactttgggaggccaaggcaggcggatcacaaggtcaggagatccagaccatcctggctaacacagtgaaaccccgtctctattaaaaatacaaaaaaattagccgggtgtggtggcgggcgcctgtagtcccagctactcgagaggctgaggcaggagaacggcatgaacccgggaggtggagcttgcagtgagccgagatcgccccactgcactcccgcctgggcgacagagcaagactccgtctcaaaaaaaaataaaagtgtagggcatatataatggcaaatatgaagtcctaaagataatatatattaatattattaggttggtgcaaaagtaattgcagtaataacatggaaagatgtccatgacatatcactgagtgaaaagagcaggttacaagataatatataaagcacaatcccatcttagtttggaaaagtgtttttaaagtatatatctagaaaacaatctggaaggattcacaccaaaatattaagagtgtggttggattatgggtgacctttatttgtttctctggttttttttttttaatctttctgagttttttgcagtatgtaccacctttacaatgaggaaggaaaaagtagcacaattttaaataggaagcagtagtttgtcatttataagggacatatcctacatcctttacagttcttaaattcctggcagatacctctttggcttattacttaccacataagatatgtattcaaaggtggtaaagaaaatccacgtcgggtgcagtggctcacgcctgtaatcccagtactttgggaggctgacgcaggaggaccgcttgagctcaggagttcaagaccagcctgagcaccatagtgagacctcatctctactaaaaaaaaaataaaataccaggcatggtagcatgtgcctgtagtcccagctactctagtcccagctacttgggaggctgaggtgagaggatcacttgagcccaggagatcgaggctgcagtgagccattatcacgccactgcactccagcctgggcaactaagcaagaccctgtctcaaaaaaatttttaaaaatttaaaaaataagaaaatccaagctaggttgaaatctgaatgttgagcagtcagtgagacacaaactagctaagaaagtcaaccctgcccacttgccatttgaagttattactagcaaaattacaaattattgcctactattcatttactaagcaaatattctcttagtccctattacgaacaacttattgttctaagtgcagaagttcagatatcattgagactgagaatattcagtctacaagtgccaggggtctactgtatcctcttttccgtcttaatacagtgctttgcacccatatatatgccacccacaggaataactttttttatagcaccagtccttcaacttctgggattaaacagattttttttcagggtataattgttctgatctaaattctttatagttgtacatagcaatctcacagggttcctaaaatataaattagagaatagcatgctgcctgcactgcactcctaaagcatgaccagtgcttgataaactctcctccatgcgaattttttaaactttttatgttgacatgatttcagacttacaaaaaaactatgagttgtacagagaattctaagtacccctcacccaaattccctaagtgttaatatgtttctctgtgtgtatatattttacaaaataacaaataaaatacatatacacattttacctgtagatacacatgtatctaaaaatttgagaacaagttgcagacataaaccattttacctctaaatattttagtgtatatttttaaaaatcaaggacgttctcgtatttaaccatggtataattaccaaatcaggaaattaacacactggtacattactattatctgatctataggccttatttaggtttgaccaattgtcccaataattcctttatggcaaaagaaaattctggattatcctagttagtatttttgaaaatcctatatcaatatgaaaataacttatttctaaaattagaaatggaggctgggcgtggtggctcacgcctataatcccagcactttgggaggccgaggcaggcagatcacaaggtcaggagattgagaccatcctcgctaacacagtgaaaccccatctctactaaaaatacaaaaaattagccaggtgtggtggcacgcgcctgtgatcccagctactcaggagactgaggctggagaatcgcttgaacccaggaggcggaggttgcagtgagtcgagatcgcaccactgcaccccagcctgggcgacagcgagactccgtctcaaaaaaataaataaataaaaattaaaacaattaaaaaaataaaattacaaatggaaaggacaaaccagaccttacaactgtttcgtatattacagaaaacgtttaaaccctccctatttcccccaccccactcctttatattcccatagctctttgtttataccactcttaggtcacttagcatgttctgttaaatcttgtattatatttattttgttactttctatttccactggtattaccactttagtactctgaatctcccgcagtgtccaatactgtacttttttacatagtcattgcttaatgaatatgtattgaattaaatatatgccagtggactactaaaacccaaagtatataagaagggtatggttgattatgtttttctacatattatttgacatacttctatcttcccatgttcttactatagtttgtgtattgccaagtctgttgtgagcccttccacaagttttgtttagaggagaacgagcgccctctggaggaccagctggaaaattggtgttgtcgtcgttgcaaattctgtcacgtttgtggaaggcaacatcaggctacaaaggtacaaaacttggtaatagaactacagctgggcctctgtatcagtgggttctgtatccctggactcaaccaaccttggattgaatgtatctgggaaaaaatgagtagttgcctctgtactctatgtgaacagactttttcttgtcattatttcctaaacaatacagtataacaactatttacattgtattaggtatgataagtaatctagagataatttaaagtatatggtgggcggatcacttgaagccaggagttcgagaccagcctgagccaacatggtgaaaccccatctctactaaaaatacaaaaaattagccaggtgtggtggtgggcacctgtagtcccagctacttgggaggctgagggaggaaaatcgcttgaactttggaggcagaggttgcagtgagccactccagcctgtggtgcagtctgtcactccagcctgggtgacacagtgagactccatctcaaaaaaaaaaaaaaaaaaaaactatatgggaggatgtgcattttgttatatgcaaatgctgcaccattttgtctagggacttgggcatccatggactttggtatcctctgggggtcctggaaccaatcccccatggaaaccaaggatgactgtgcttagagtattgctttctttcttgatttgtatttctgtcttccagttaagattttgtatctatattatttctctttttacttagtctgtctttagcatttaattgggtgtaatcagttgcctattttgtgttttaattttgggactatagcagaaaacatgatgttgaataaaattccaaaaataagtcaaatctacctaatatgaatactcatcactgagtgcctttggcaggaaataaatctatctcaatgctttaattgggagtaaataatgtatgaggaaatttaaactcataattgtgtgctgtacttacttgccagtaaatgtgaaatggggtactaagtaataggtgttgggtgaaggtaatatgatgcttatctttttgccattatattttcttacagcagctgctggagtgtaataagtgccgaaacagctatcaccctgagtgcctgggaccaaactaccccaccaaacccacaaagaagaagaaagtctgggtgagttatacacatgatgctcttttatagagaaccaccatgtgactattggacttatgtaacttgtattacaaatatctatgcttgaggatgtcagtatgacaatctttttgcctcattactaggaaatcatctcagcagagaaattaaatctataaatggatgcatttaagatctttttagttaagtaaagatattaaaaacaagaaattcctattgaatttcttttcttcttttctagatctgtaccaagtgtgttcgctgtaagagctgtggatccacaactccaggcaaagggtgggatgcacagtggtctcatgatttctcactgtgtcatgattgcgccaagctctttgctaaaggtacccaaaaaagccagttttgccagctttcggaggttgtacttggtgttctggaggtgaactagactctagtgaaatgaaataaaaagtctcacacattatgtcaaggataccatttagacacatttcctaagttcctgtttagaacttagcaactagaaatgtcttgttagtttatacgggaagtgttaaggggacttttcattataactaaccacaaagaaatcctctaagctagtatttcccaaagtgtgatatatatattatatatttgattatttcagacattattttagttgctacccaaacattttctttcagtagttatattagaaaaaaatattaatataactaatacattaaacctgttatattactgacttaggataatcatataaagttcactgttttaagtaagataagcagatcagtttgaagaagttcattaagtaaaaaataatataggagatctctgtatataaagaaaatttatgaaggttatacagagtactgaatcttaggaagtgctcctctaagctctaatgtaaatgccctagaaataaggaaaaagcttacatgtactgtttctgacttccatattgccacttcttttaaatatttaaatatttcttacaaatgtgtgagaaacttctctcttccattcttttctattgttttatctttaaaatctacctcatgacctttataaatgaaaactagtaaactaaagaaaactagtagcatatgaagcttttctgtgagtattcgaggggctcagaataatcttgagactgcagatgtgtgaacattccacagtagatccatgctggtgttcatgatcccagaagaatatagatttagattgggttggtaaatgcaagtcgagggccgtaaaaacacgggtatgtgagccaaagcactgctgtaaactttgctttgctttcaggaaacttctgccctctctgtgacaaatgttatgatgatgatgactatgagagtaagatgatgcaatgtggaaagtgtgatcgctgggtccattccaaatgtgagaatctttcaggtacagaaggttggagtctttttatttcagttttcttctttctaggtactactacatttattagcctctagagcactttaaacctaaaattatggttgtgttgttatttgaaatctctaaatttattttttagtctctagaataagcagcattgtattatttgtgctcacttatcttgaatatatgcctttaaagtatttatttgctgtcctttgtgtgttccataacctgattctcaataaccaaattcaggattagtgttaattaataatgccactttttgagatcaatatgtgtcatatccatgaggacattaaaatcttaatgtggttcccaacatatggctttatagtaagttcagtggaatagtttcctcttcttcctctctctcattcttcagaggacctcatcatggtaggtttttgttttcttagatgagatgtatgagattctatctaatctgccagaaagtgtggcctacacttgtgtgaactgtactgagcggcaccctgcagagtggcgactggcccttgaaaaagagctgcagatttctctgaagcaagttctgacagctttgttgaattctcggactaccagccatttgctacgctaccggcaggtaggccaagtctcatttttttctgagagcttgttcttaggtagtctttacctagtgtttttcttttgttttacttcattctcctcacttaatttttagttacttgttttggctataaccattaggaaaatatttagagccaagaataggaccttctttagcgtaagaaataggaaggagctgtatcttcaaaggtcttgctgttacaatgagaaatttggactttatactctgaaggtgatagggagccagtgaagcacttcacccaagacagtaacctgatcagagttgcttcttagaaaaaatattgttctgactgagtggagaggaaggactggagacacctgagcctagaggcaggattcgtagttaggggacagttatagtaatcaactggaaaaacactttctgtttatgtaagttgtgaactttacacatttataaagtagtcattagaagaaccacacggggccgggcgcggtggctcacgcctgtaatcccagcacttcgggaggccgaggcgggcggatcacgaggtcaggagatcaagaccatcctggctaacacggtgaaaccccgtctctactaaaaatacaaaaaattagccaggcatggtagcggtcacctgtagtcccagctactcggcaggctgaggcaggagaatggcgtgaacctgggcggcggagcttgcagtaagccgagatcgcgccactgcactcaagcctgggtgacagagcgagagtccatctcaaaacaaaaaaaagaagaagaaccgcatggatcactttacctcagagctaagctgctgttttatcttttaatagagctccattttttgaataggaaaattagctgctttctatgttaaaaggaactgaacacaatttcagcttcttcatactaggtttggaattatcaagaaaagctcctaagttaccctagctaagctattacataacagtctcatttttaactttccttttctatttgagaaatctgattattttcatgttccttgggttttacaatattaatcattcagtaccatctttattaattttaatagaatttacatggacaccttggttttagtgttagataaaagcaacatatctttcctggcaataggctgccaagcctccagacttaaatcccgagacagaggagagtataccttcccgcagctcccccgaaggacctgatccaccagttcttactgaggtcagcaaacaggatgatcagcagcctttagatctagaaggagtcaagaggaagatggaccaagggaattacacatctgtggtatgtttctacagtgagccatcagaatttctagtgccaataaagcttctttggacctttggggcatgaaactgagtataagtaaatttaaaaatgaattgtattatatttagaaatgtcacgtggctttagatacctaaaaatgtatgagttattttagctttgtgtttcagaagaagggttgtgatagggaagataatgtcttaaaatagttcttttatttggctttcatctcagttttctgaaaattatttttatattaagaggaagcactaagaaactgttgatgtgggaaatgctaatatgaaattaattggttctccctccccttttgagatcagatctgaataatgtgcctttctttataaggtcttcatttgtagatagatgcctgttaattttatgattttaagtatgtataggaaatgattatttattatctcatgatctatatttgcgattctgttgtttatttttatttatttatttatttatttgagatggagtctcgctctgttacccaggctggcatgcagtgacatgatctcggctcactgcaacctctgcctcccgtaatcaagtgattctcctgcctcagcctcccaagtagctgggattacataagcatgtgccaccatgcctggctaattttgtatttttggcggagattgggtttcaccatgttggctaggctggtcatgaactcctgaccttaagtgatccacccacatcagcctcccaaagtgctgggattacaggcgtgagccactgtttatttattttaatccaaaataaaaactgtggacctgcttggataatttatcatgatacagccaatttgtttgcattcttacctcattagcctggcatctcttaattgccacaggttaatcgtgaattgaatctcaaaggtctcagccaaagagtattataccacattaaaatagggtgtgagttttctgttggatctctgtgctggatgattaaggagggaagaggaaatggttttcagagcacactgttttaagaataattaacattttgtttttgtatacagttggagttcagtgatgatattgtgaagatcattcaagcagccattaattcagatggaggacagccagaaattaaaaaagccaacagcatggtcaagtccttcttcattcgggtgaatgatattactaattcatgtttttaatgcttacctataagtaattaccctgtgaatacaatgaacttgttctcttctactttttgctttgtggtgtgtataaaacatctttggtttaatttgatcccctgattctttgagaggaacttggtgaggttgccagagtggatggatctttctcttggtggcctgaaattatcctcgtattaacagagaagctggtttgaagatttttcatgtggtatctaaatgagtgtttacatatttacattttgtttgtgttttcttttagcaaatggaacgtgtttttccatggttcagtgtcaaaaagtccaggttttgggagccaaataaagtatcaagcaagtaagtgaatttagcataacttttttttctcctcatcggctagaaatctgagagttctcatatttctagattgcagttttccaaaaggttttaatactagaaatgaattggttgaaatgccttttcggtgtggttttgaggactacatttaatgtttgttataagcaattgcctttttgttctttacttttatatttgttttattgtagggagcttggtttaattgtgacaaatgtacaatacatgtgtggtacagccatgtagctggccttgttataaatgggttctgtttgactgatagttcaaatggtgctttgtactgctcttgattttccatatgtaacctttaatttttattccagtaaattcttttgatttgattttatttatttatttatttttttttttttgagacggagtctcgttctgtcaccaggctggagtgcagtgacatgatctcggctcactacaacctccgcctccctggttcaagcgattctcctccctcagcctcccaagtagctgggaaaacaggcgggcaccaccatgcccagctaatttttgtattttaatagagactgggtttcaccattttggccaggatggtcttgatctcttgacctggtgatccgcctgcctcaccctcccaaaagtgctgggattacaggcatgagccaccatgcccggcctcttttgagtttttgatagggttatcatttgtttcagcaagtttaaccaagagtcatatgttgagatattttttaaaatattgagttctgtgtacttcagcaattttcaaacgctgtgacttgttcttatattctgtgaatggctcctacatggggcaacaggtgatatcaagaatttattttatacagttctaggtatactgtaggagttcaataaatgcttgttgaatcaattattttcagcagtgggatgttaccaaacgcagtgcttccaccttcacttgaccataattatgctcagtggcaggagcgagaggaaaacagccacactgagcagcctcctttaatgaagaaaatcattccagctcccaaacccaaaggtcctggagaaccagactcaccaactcctctgcatcctcctacaccaccaattttgagtaagccaccaaaaggagagtcgtcacccatttccctctagatgcagatgattgacttcgtgaatccaattcactaaaattagatatacttggatatcagaaaggaattttcaggtcatccttaaatgtaataccatcattaattttgcttcacttgaggtgttaatgaggacttgatataaatactctggagtattgtaacatagatgatgaggtagcgtaactctgaacactttttgaaaagtggttattttataggctgtgggctatgtaagctgaattatttcttttttccttgaaatcagacatagtattgccaattttaactggatctcaaggtattgatgggagtcttttggatttcaaggtactgataggagtcgagaagacagtccagagctgaacccacccccaggcatagaagacaatagacagtgtgcgttatgtttgacttatggtgatgacagtgctaatgtaagtactttgcaacacagggccctagttaatacatactccaaaagaactgtttgtccttgtgtccatacttgatgactgggtgccatttatttaatgaacttacttataacttactaatttataacttttatttacctataacttataacttattaatttgtaacttattttttgtcacttagttcatggcacttggagttttttaatgactgattttgttgattaaaaggtgactgatttgccttaaattaaacccttgatgtctagtaatttctaatggaagttcctcaagaatattttgtgaaagttaataaaatctaagttgcatattaaaaagcttgtgtttcatataggatagcagaatcgttaagagcccgagttctgccgcctgcctgaatacatttctgtgcttaactgcctacttattgactttggcaagtagtttaacctctctgaccctcagtttcatctttaaaatgaagataataacgcttacctcagagtggctgtgaggattaaatgaaataatgtatgtaaagcctctatttggtgcctggcacacacagtaagctacaatttttttaaaagttttttgtgttttttgttttgttttgttttgtttttttgagcggagtttcgctcttgttgcccaggctggagtttcgctcttgttgcccaggctggagtgcaatggcgtgatctcggctcactacaacctccgcctcctatgttcaagcaattctcctgcctcagcctcccgagtagctgggattacaggcatgtgccaccatgcccggctaattttgtatttttagtagagacggagtttctccatgttggtcaggctggtctcaaactcccgaccccaggtgatccacccacctcatatcccaaagtggtgggattacaggcgtgagccaccgtgcccggccaaaagcttttaaataccatctgagagaactggctttgaaatacagtttatagatgtcactgcacatttttataaacttaccacctattgctctttttgtttgtttccttttgagaccaggtcttgctctgtcacccagactagagtacagtggcatgcttttggctcactgcaatctcggcttccggggctcaagtgatcctcctacctcagcctcctgagtagctgagaccacagatgcgcaccaccatgcctggctaatttttgttttgtttttgttgagacaaagtctccctatgttgcccaggctggtctcaaactcttgggctcaagcgatcctaccacttcagcctccaaaagtgctgggattacagacgtgaaccaccatacccagctcatttttttattctctagatttgtaaaatagtttcagtctatggaaaaagtaatcttgaaaagaaggaagtggaaacagagcaacgttgcaaaaagaattctgatttctgtgtgcctccctccattaaagaattatagttgctttcttgaggttatcttcactggaaaagctaatgccgaggaaaacctcctttggcattatattctttaggaaaaaagaaatctctttattttataggatgctggtcgtttactatatattggccaaaatgagtggacacatgtaaattgtgctttgtggtcagcggaagtgtttgaagatgatgacggatcactaaagaatgtgcatatggctgtgatcaggggcaagcagctggtaagaccttatgggtaaattttatgaaagagattccctctcagtttccagatattcttcctgtgggtgaatatggcctccctgatatttttcacagtgccatcagggtagttagccaacaagtattgatatacataattcaacagataaaatgataaattttatctgttttcaatttatcaatagataaaatgaattgtaggaactgtagaatgggatgagtctatagaggagacggtaaacgtcttaaaacatatgaaagtctgaataggactctgttctttttggatttttagagatgtgaattctgccaaaagccaggagccaccgtgggttgctgtctcacatcctgcaccagcaactatcacttcatgtgttcccgagccaagaactgtgtctttctggatgataaaaaagtatattgccaacgacatcgggatttgatcaaaggcgaagtgagagagctttagttgctttaaaaaaaaaaaaaaagacttttttagagcagttttaggttcacagcaaaattgactggaaggtacagagatttcccatatgccccctgcacccacatatgcacagcctcccccatgatcagcatcccccaccagagtggtgcatttgttacagtggataaacctacactggacacatggttatcaccctgactcctgtagtttacatcagcattcactcttggtgttgtacattctgtgggtttggacaaatgtataatgatgtatatccaccattataccatcatatggagtattttcgctgccttaaacatcctctgtgctctgcctattcatccctgcctctccccaaccctgggcaaccactgatgtttttactatctccatagtcttgccatttgcagagtttcacatagttggaatcatatagtacatagccttttcagactggcttcttctgcatagcatttaagtttccttcaagtcttttcatggcttatttagttgctttttgaattatttcgaaatgcaaaagaaaaacaaaaatacagcaagatgataaactgttttgcttttctacttggtgttcctagaggcaccacctcttttgggaaatacagaagtgtcctgctaagtgaaacagaaggatgcttttgagatatgctatgtgccttccactctgagacagtcaggatcataagtataatgtgcaaagggacagcctattaacagctaccatgggttttatttaaggtggttcctgagaatggatttgaagttttcagaagagtgtttgtggactttgaaggaatcagcttgagaaggaagtttctcaatggcttggaaccagaaaatatccacatgatgattggtatgacctagccttggttattggggaaggctgtatatatcattggggaaatttctggtcctcagttataaaatgaccctcagccaggtgtggtgtctcacgcctgtaatcccagcactttgggaggctgaggcgggcagatcactggaggttcaggagttggagaacagcctggccaatgtggtgaaaccctgtctctactaaaaaaaattagctgggagtggtggtacatccctataatcccagctacttgggaggctgaggcacaggaatcacttgaaccccggaggcagaggctgcagtgagctgagattgcgccactgcattccagcctgggcgacagagtgagactctctcaaaaaaataaaatgacgctcataatcttctctaatcggttcttctttccttggtcagggtctatgacaatcgactgcttaggaattctaaatgatctctccgactgtgaagataagctctttcctattggatatcagtaagtagcactataaagagaagagagcagccccacaacctgaacacactgaagccatgtgcaggtcattaaatgtagaggcatacctgttagctactttaaactgctactaaaaattaatcacttattttgctagttctcggattcgtctgcttgtagattgggactatgttagcggaatccagttatagaaggaaagtattattgacataatttcagaattacttaaaaataaaaccttagtagaaaacacaaggtcagtctcttaagattcctccaaattccattcatctccatgcagaagtgcagattgtttttatggataaaacagctcatgccctgttcccaactttacagtttataagtccttctaaaactataaatccacacaataatgatcaaatttttcaataagaatttataatcttacctatatgaagtaagttgttaaaatgtctaacaagctaacaatataagttcaaaattccccttctaccactcccgcgttggagtctcattttgcaatatatgctccaacttactctgtattcctattcctatgacacagtctgtgctccacatttagctggcagcttttcacacaaaccagattccactagcattcagcagatttgaagcagttacatttctcttgtctcatggggctcttctcccaaaggaaacacctcaggtttgccctttgttttattttcaggccgtactttgtatacattgtaaggcaatagttcggtcctgaaggccaaaactaatttttgtaatggttaatatttttctttctcttgcttttaggatgttttactatatttggtgcctgcttatggtacaagaaaaaaagatcttaggctattttctgagaggctaagaaaaaccaaggacttcaaaaagcttggaacaacctaactaggggaatctatactaagaacccataaaataaagctaaactctgtaattaagagggccagggaacctaggataaagagaggttttgaaaaatgctagtttctgcttctatcctctcccttatgatgattttcccaaatctgtttacccaggtgttccagggtatactggagcaccacagatgctcgcaagcgctgtgtatatacatgcaagatagtggagtgccgtcctccagtcgtagagccggatatcaacagcactgttgaacatgatgaaaacaggaccattgcccatagtccaacatcttttacaggttagtcttgaatcaagatgggacttgaggctgggcacagtggctcacgcctgtaatcgcagcactttgggaggctgaggcaggtgaatcacttgaggccaggagttcaagaacagcctggccaacatggtgaaaccccatctctactaaaaatacaaaaaaattagccaggcatggtggcaggcacctgtaatcccagtaatcccagccactcaggaggcagaggcacaagaatcacttgaaccagggaggcagatgttgcagtcagccaagatcacgccactgccctccagcctgggtgacagagtgagactgtgtctcaaagaaaaaaaaaaaaagatgtgatggaacttgaattcgattcagggagtactatgattgaaagctgggggaaaagtcatttacttgggaagtctcatttgcttctagttttacatttacctgatagctgactttttattggttaatttgtttgatattttaattgggcctttttagttaagagtttttatttcctgccacagaaagttcatcaaaagagagtcaaaacacagctgaaattataagtcctccatcaccagaccgacctcctcattcacaaacctctggctcctgttattatcatgtcatctcaaaggtccccaggattcgaacacccagttattctccaacacagagatcccctggctgtcgaccgttgccttctgcaggtaaaagactttattgacctacttgacctaagaagatcagcccaaagactaatttgtaattctttcaggcaactttatcttggtgacttttactgattgaaaatgtagattccgggtgggtgaggtggctcatgcctgtaatcctagcactttgggaggccagggcaggtggatcacctgaggtcaggagttcaagaccagcctggccaacatggtgaaaccctatctctactaaaaattcaaaaattagccaggtgtggcggtgcatgcctgtaatcccagctacccaggaggctaaggcaggagaatcgctggaacccaggaggtggaggttgcagtaagccgagatcgcaccactgcactccagcttgggtgacagagtgagacactgtctcaaaaaagtaataataaataaatagaaaatgtagatttccagttacctataaatatatatatatatagtcaaatcattgaaaccagtgacttctacacatttgttctatctacaatagcatttattactttttctctcttgtttaggaagtcctaccccaaccactcatgaaatagtcacagtaggtgatcctttactctcctctggacttcgaagcattggctccaggcgtcacagtacctcttccttatcaccccagcggtccaaactccggataatgtctccaatgagaactgggaatacttactctaggaataatgtttcctcagtctccaccaccgggaccgctactgatcttgaatcaagtgccaaagtagttgatcatgtcttagggccactgaattcaagtactagtttagggcaaaacacttccacctcttcaaatttgcaaaggacagtggttactgtaggcaataaaaacagtcacttggatggatcttcatcttcagaaatgaagcagtccagtgcttcagacttggtgtccaagagctcctctttaaagggagagaagaccaaagtgctgagttccaagagctcagagggatctgcacataatgtggcttaccctggaattcctaaactggccccacaggttcataacacaacatctagagaactgaatgttagtaaaatcggctcctttgctgaaccctcttcagtgtcgttttcttctaaagaggccctctccttcccacacctccatttgagagggcaaaggaatgatcgagaccaacacacagattctacccaatcagcaaactcctctccagatgaagatactgaagtcaaaaccttgaagctatctggaatgagcaacagatcatccattatcaacgaacatatgggatctagttccagagataggagacagaaagggaaaaaatcctgtaaagaaactttcaaagaaaagcattccagtaaatcttttttggaacctggtcaggtgacaactggtgaggaaggaaacttgaagccagagtttatggatgaggttttgactcctgagtatatgggccaacgaccatgtaacaatgtttcttctgataagattggtgataaaggcctttctatgccaggagtccccaaagctccacccatgcaagtagaaggatctgccaaggaattacaggcaccacggaaacgcacagtcaaagtgacactgacacctctaaaaatggaaaatgagagtcaatccaaaaatgccctgaaagaaagtagtcctgcttcccctttgcaaatagagtcaacatctcccacagaaccaatttcagcctctgaaaatccaggagatggtccagtggcccaaccaagccccaataatacctcatgccaggattctcaaagtaacaactatcagaatcttccagtacaggacagaaacctaatgcttccagatggccccaaacctcaggaggatggctcttttaaaaggaggtatccccgtcgcagtgcccgtgcacgttctaacatgttttttgggcttaccccactctatggagtaagatcctatggtgaagaagacattccattctacagcagctcaactgggaagaagcgaggcaagagatcagctgaaggacaggtggatggggccgatgacttaagcacttcagatgaagacgacttatactattacaacttcactagaacagtgatttcttcaggtggagaggaacgactggcatcccataatttatttcgggaggaggaacagtgtgatcttccaaaaatctcacagttggatggtgttgatgatgggacagagagtgatactagtgtcacagccacaacaaggaaaagcagccagattccaaaaagaaatggtaaagaaaatggaacagagaacttaaagattgatagacctgaagatgctggggagaaagaacatgtcactaagagttctgttggccacaaaaatgagccaaagatggataactgccattctgtaagcagagttaaaacacagggacaagattccttggaagctcagctcagctcattggagtcaagccgcagagtccacacaagtaccccctccgacaaaaatttactggacacctataatactgagctcctgaaatcagattcagacaataacaacagtgatgactgtgggaatatcctgccttcagacattatggactttgtactaaagaatactccatccatgcaggctttgggtgagagcccagagtcatcttcatcagaactcctgaatcttggtgaaggattgggtcttgacagtaatcgtgaaaaagacatgggtctttttgaagtattttctcagcagctgcctacaacagaacctgtggatagtagtgtctcttcctctatctcagcagaggaacagtttgagttgcctctagagctaccatctgatctgtctgtcttgaccacccggagtcccactgtccccagccagaatcccagtagactagctgttatctcagactcaggggagaagagagtaaccatcacagaaaaatctgtagcctcctctgaaagtgacccagcactgctgagcccaggagtagatccaactcctgaaggccacatgactcctgatcattttatccaaggacacatggatgcagaccacatctctagccctccttgtggttcagtagagcaaggtcatggcaacaatcaggatttaactaggaacagtagcacccctggccttcaggtacctgtttccccaactgttcccatccagaaccagaagtatgtgcccaattctactgatagtcctggcccgtctcagatttccaatgcagctgtccagaccactccaccccacctgaagccagccactgagaaactcatagttgttaaccagaacatgcagccactttatgttctccaaactcttccaaatggagtgacccaaaaaatccaattgacctcttctgttagttctacacccagtgtgatggagacaaatacttcagtattgggacccatgggaggtggtctcacccttaccacaggactaaatccaagcttgccaacttctcaatctttgttcccttctgctagcaaaggattgctacccatgtctcatcaccagcacttacattccttccctgcagctactcaaagtagtttcccaccaaacatcagcaatcctccttcaggcctgcttattggggttcagcctcctccggatccccaacttttggtttcagaatccagccagaggacagacctcagtaccacagtagccactccatcctctggactcaagaaaagacccatatctcgtctacagacccgaaagaataaaaaacttgctccctctagtaccccttcaaacattgccccttctgatgtggtttctaatatgacattgattaacttcacaccctcccagcttcctaatcatccaagtctgttagatttggggtcacttaatacttcatctcaccgaactgtccccaacatcataaaaagatctaaatctagcatcatgtattttgaaccggcacccctgttaccacagagtgtgggaggaactgctgccacagcggcaggcacatcaacaataagccaggatactagccacctcacatcagggtctgtgtctggcttggcatccagttcctctgtcttgaatgttgtatccatgcaaactaccacaacccctacaagtagtgcgtcagttccaggacacgtcaccttaaccaacccaaggttgcttggtaccccagatattggctcaataagcaatcttttaatcaaagctagccagcagagcctggggattcaggaccagcctgtggctttaccgccaagttcaggaatgtttccacaactggggacatcacagaccccctctactgctgcaataacagcggcatctagcatctgtgtgctcccctccactcagactacgggcataacagccgcttcaccttctggggaagcagacgaacactatcagcttcagcatgtgaaccagctccttgccagcaaaactgggattcattcttcccagcgtgatcttgattctgcttcagggccccaggtatccaactttacccagacggtagacgctcctaatagcatgggactggagcagaacaaggctttatcctcagctgtgcaagccagccccacctctcctgggggttctccatcctctccatcttctggacagcggtcagcaagcccttcagtgccgggtcccactaaacccaaaccaaaaaccaaacggtttcagctgcctctagacaaagggaatggcaagaagcacaaagtttcccatttgcggaccagttcttctgaagcacacattccagaccaagaaacgacatccctgacctcaggcacagggtgagagatccaaatactagctaggctgggtctgtgggatttcatgttgtaaattaggggctgttgatgtggtagtccgggagagacactcttctgttcaagttgcattacctgggagttttccgggttttgactttttttctctctgagtggtgatttatgtaacaaaatgtagttccatccatgggcagtttgtctcttgaatagaaccacatctaatcactttttgctctgatttcaaacagtgttgctgtttgttcctgtttcttttttactgaggcttatactagaatgattattcttatcttgagggcaaagctccctcttgtagatccacagagtcctttttttaaaactttatcattgaaagccaagcacagtggctcatgtctgtaatcccagcactttggaaggctgaggcagaaggattgctggagctcaggagttcaagatcagtctgtgcaacatagtaagaccctgtctctacaaaaaattttttaaaacagctgggtgtggtgttgcacacctgtagccccagctattcaggaggctgaggtgggaggattgcttgagcccaagagttagaggctaaatgatccatggtcatgtcactgcactccagcctaggtggagtgcacctatgtagccaccactcggatcaagatacagaacatttctagcaacccacaagggtgtcttctcttataaggtcagtgccccctcaaagtaaccattattctaacctttatgaccttaggtcagttttgctggcttatagactttatcagatcctgatagagccatttctttcgactcacctccacattcagtacatatttactggtggtttgtcttgaaaagatacaaatgcctgtgttccaggactccaggagcagaggctgagcagcaggatacagctagcgtggagcagtcctcccagaaggagtgtgggcaacctgcagggtaagctgaagaattcgtcttttaagactaagctctcagttttgtccacctcatttaaaaaatagttcttccaggccgggcgcagtggctcacgcctgtaatcctagtagtctgggaggccgaggcaggtggatcacgaggttagatcgagaccatcctggctaacatggtgaaaccccgtctctactaaaaatacaaaaagaattagccgggcgtgatggcgggcgcctgtagtcccagccactcaggaggctgaggcaggagaagggcgtgaacccaggaggcggagcttgcagtgagctgagatcgcgccactgcactccagcctgggcgatagagcaagactccgtttccaaaaaaaaggtaaaaaatagttcttcctgattcacattgatttttgttttcttgccaaagttttttaaatgagaatagtacaggcttgtaaacaagtaaacaaaaaatataacaagaattatttaaataatggataatagtttcctatttgtccccctcacccccgcccaatctactccctagaggtggtcattgctaataatttgtttttatctatgcagacatctctctgcatataaagatataacgtggtatatatatgaatatgtatacacttttttacataaaaggaataatactgtacatactgttctgtatttggtttttcacttatgtacatctttctgtgccaatatatgtaggtgtgcttcactttttaaatcgctgccgccaattctattgtgtggatctacaatattttaatgagtcctctattgatatacatttggattgtttccagaatttatttagtttaaaaaagtgaaaactggggctggacacagtggctcatgcctgtaatcccaacactttgggaggctgaggcaggaggattgcttgagcccaggagtttgaaaccaaccttggcaacatagggagaccctctctctacaaaaattaaaagttaaccaggcatggtggtgcacatccacagtccaagctaaggcgggaggattgcttgagcctgggagttggaggatgcagcaagccgtgattgccactgcactccagcctggacagcaaagtgagaacctatctcaaaaaaaaaaaaaaaaaggtgaaaattgattgtggtttataagctcatgcagcttattttttagttttagttaagccagcttacttatttaagtaactttagaattgcttctgacaagtgtcctttcatttttttctaatactgagtatgagaagaatttcaagggcgcaatttacaactttaaaaacagaaacttaatgtcagtatttggtaaagaatctcacaaaagagttttatgttatgtaccatacagtggtgtggtggttgtattcattcaacaagttctacagaaagccccctgtggctcattttctagcagttattttgtataccacagctgtatagaaaattctgggttttttctttgaattgaagaactagctgatattatatcttacatttggtttttatttaggcaagtcgctgttcttccggaagttcaggtgacccaaaatccagcaaatgaacaagaaagtgcaggtatgtgggtgggtaaaaggttagaatcagagaatatcaatgctaaaaggattatgagaatcacccactttacctacttattttctacatttaaaaaaaaaaatctaagctccaaagaagttaagtgatttggcccacattggactgaaacttggcgcacctgtctctcggtgcagtgttcttccagtacatattgtgtgatcacctgtcagctaaggactcaagaccatacccatactcttctgctgtactggttttaccagcactgaggcttaaatagctagtaataacctgacttcactttttagttgttactaaagaaaactaagaaccatttttattagatagtcagattttggttacaataccagatacatctccatggcattttccatcagttctaatgaatttgattaggaaacaaatggtcacttcaagattagagagttctgggtataactctattgaggacagttgcttattgaaaaactatcagatcgtcatactagaaattctaccacagagagcataacttcatgtaaaaaaaaatctggttttagtcaccactttctagcaatgacctaggcaagctctttgagtcttgggtttgttatctataaatgggaataataaaccaactgtggaatgttgttaggcttagagatcatttatgtaaagtactctacatgtagtcagtgctcagtgagcatttgttactgcaaccactatctattttctccctattagaacctaaaacagtggaagaagaggaaagtaatttcagctccccactgatgctttggcttcagcaagaacaaaagcggaaggaaagcattactgagaaaaaacccaagaaaggacttgtttttgaaatttccagtgatgatggctttcagatctgtgcagaaagtattgaaggtgagtggattaaatcaggttgacccatcagcagaagccctgtttcagctagagcttcattttctgagtattagcaccatttaggtggctgttttatgctagatggtagggggatacctggaggcatcatacattttccttgtccttgagaagtttgtcttattggagaaatagccatattttacatgaaaagttaatgatacagattatgttttcaacattgcacacaccttagcggagcccctgagaactctgcttccccctccagccttgttttttgccattccctcatgcgccttctgtgcccttctctctcccttgtgtgccttcacacgtgctttctcctctgcctggagttctctccctgccctcaatcacctggtgagctccagctcacccttcaagatccagctcagacggtcttccctgaccttctgaggtagctaagccctccctctccctccttttgaatcttacatgttcttctctcatagcttacattttgttttgtccgtgtttgtttacttttatcactcactcaacagcgagctctccataagggctggaattttattttcttattcatctttgtatcgcaagcatctaagtgttcatccacctttgaaggactagtaaatgttctctaggctgtaagtactagaagagttcaaagaagagaaaggtcaccatgggtgagttagggttatcaaaaacccatgaagataaatagaagattctattaaaggagaaaatggaatttgggttaggcaaagaagaatgcagggctctctaggaagaagaagggaggtaagcaaagttagaaaggcaggactgcatttggtgggtttagagtagtgtcaggtgagatggcattgaaatccatgtgaggtaatagtgaaagagaaaattgggaaggtggatagggcacaggttttagagggctttcagtgccaaaccttgaggactttgaaaacttgagggagtgaatagaagcagaatttcaggaaacataatgtgataagctctctatatgagacagattgagcatgaactggagatgctcaaagacgagagtttactaatgagagtattgctagagtagagatgtctggtaataaagcccacattcggtgggaaaagaaaggaaaggaaagaagaatgagtacacttggtggaatatggagaggggagagtcaaagatgaccctaaagattcaggcctgggtgactaaaacaaaagataatgcatggagaacaaaggagataagtaaggagtatgggggttccacagaagacattgatgtggagtgatgtaagaaatccatgtggaaatgcctagcagacaggaaaagatcacagaatcttgggttagagctggaaggaactgtaaggattttctagttctgcctcttaactttaaggaacagagaggttatgatcttcccacagtcctgcttaaatcattattactagtgctgttttgattaggggtacagggaacataaaaataccaaacattcaggtgtgagacccagacttccatcaagggatgtgaatgcgttggggattcagagttcatttcagaaggtctgactttccttagtgcttctgtgtcctccaacagaaagaagccctgctggggagtgtaccttttcggctcctttcacatgtaatgaactgacttaaactctaagaaaaataacaaaacactgctctaggagggcaagtgttcacactgtagggattctaagcagtgcttgtgcacatcattggtattaagaagggtttacgtgcatattttctggcttacgggttttctttatttcctttcagatgcctggaagtcattgacagataaagtccaggaagctcgatcaaatgcccgcctaaagcagctctcatttgcaggtaatggctggaggtgttattccactcctgtctcagaatattatggtaaattgttcgcctaaggcagagttgattctgtgaaaaaaaaatcagttaaaaatttttttcacagctttattgagatttaattcatataccatacagttcacccatctaaagcatacaattcagtggtttttaatatattcagagttgtataaccaccactactctataattctagaacattctcatcatccctaaaagaaaccccctattcattagcagtcattcctcagcccctggccaccacaaatctactttctgtctctatgtatttgattattctggacatttcatataaatgaaatcagacaatatgtagccttttgtgaccgtcttctttcactcaacagaatactttccaggttcttcccttctgttacatcttcccttccacatcagtacttcattcctttttattgccaaatattccattgtgtagatataccatatgttgcttatccattcattagtcagtggacatttgggttttttctattttctgctacgaataatgttgccacaaatattcatgttcaagttattgtgtagacatgtttttattttttttcagtatatacctcagagtggaatggctgggtcatatggtaactctttaactttttgaagtactgccaggttttttttccaaagtggctataccattttacatttccacctgcaatgcacgagtgttcccatttctccacctttgccaacacttacctgttttttgtttttttttttttattttagacattgtagtgtgaaatgttatcttttcttaaagttgaaatcatttaccattggtattagacttcatattaaatttaggcagcatacaaacttattaatacacttgttttgagcaaacactaaagattttaatcagtggatgctgtggctcacacctgtaatcccaacactttgggtgaccaaggcagaaggatcatttgaggccaggagttcaagaccagcctgggcttcatacagagaatacatctttacaaaaaataaaaatatatattagccggcaccgtggcatgcacacctgtactcccagctactctggaggctgaggcaggaggatcactggagcctaggagtatgagactgtattaagctatgatcttagcactgcactccagcctgaacgacagataaatactttgtcacaaaaaaaagaagaagaagaagaagaaggttttaattaagctaaggtagaaaccttccattgactttgttttatccatatctacctctcctacctcctttcagattgctcctggaaaggtgggtgaatgggtacttacaggaattttaacttttttttttttaggaatttaattttatcagtgatgttcttcctttaagagggaagggaaggaaaatatttggatgcactttagaaaatactaacatttgttcattttatgtgacaggtacatgcatggctattataacaccctgtgtatttttttatacttaaaatttttcagaacttttttaattaaaaaaaagagaaaaagacccaacaggcagtttatctcccacaaaatacaaatggcccatagcatgaaagggtactcaatctcagctggacacagtggctcacacctgaattccaacatcttgggaggattgtttgagtctaggagttcaagaccatcctgggcaatagagtgagacctcatctctatataaaaaaaaattgtttaaattaggcaggcatgatggctcatgcctgtggtcccagctacttgggaagctgatgtgggaggagcgcattgagcctgggaggtcaagcctacagtgagccaagattatggcactgcactccagcctgggtgacagaacaagaccctgtctcaaaaaaaaaaaaaaaaaaaaagaaaaagaaaaaaaagtcttgctcataatttttaaaattctaccccaaaaatataagtcacatccctttctttttctctgacatatcccttgttattctctcatgcaatgttaaaaagccctataactgagtctcctatctcacctccttgtaccctcagagtctccagaggtgcctcaaaatcttactattgcctactagttacagagtataatcttcaacccttacgtatttgttattagtaaatatttactgaccacttgtaaaatgcctggtaccatgttaaacacaggatacagtcgctgagtagcgacccagccctgctctttgaggtttcctgtctacggatccttacatggcgaggtcctcttcagccggattcatctgttcagtctcagctttccccacttccctcactgctcaagattctttgttctgcagccacactacactatttactgttccagatccatccatgtgtcttttttttttttttctccaagacagagtcttactctgtcacccaggctggagtgcagtggcgtgatctcggctcactgcaacctccatctcccaggttcaggtgattctcctgcttcagcctcctgagtagctgggactacaggcgcatgctaccacacccggctattttttgtattattattatttttttatttttatttttattttttgagacagagtttctttcctgttgcccaggctggagtgcaatggcgcaatctcggttcaccgcaacctccacctcccgaattcaagcgattctcctgcctcagcctcccgagtagctgggattacaggcatgtgccaccatgcctggctaattttgtatttttagtagagtcagggtttctccatcttggtaaggctggtcttgaactcctgacctcaggtaatctgcccgcctcagcctcccaaagtgctgggattacaggcgtgagccaccacgcccggcctaatttttgtatttttagtagagacggggtttcaccgtgctggtcaggctactctagaactcctgagcttgtgatctgcccacctcggcctcccaaagtgctgggatcacaggcgtgagccactgtgcccggcccatccatgtgtcttaaagtgtagcctataggtgtgaatcagaatccctgggcttggagctgagaaagctgaatttttaacatgtgcccccaagcaattcttattacttaccctaaatgtgctttcatatcagcataacatggttgatgcagttccctccaccaggacctatttcctccatctactctcttccctccaaattccctggtttacacaacaaactcctgttaatcctttaagactttgctcaaggtcacctcttttctttaaccttttttgatcattcttcctgtgcctacggaaatcccaactcttaactgatttaaagagtgagataatttatcatcttatataacagaaagtccagaggtagggacagacgtgtcaggattgattggtacaggagcttgcaatgtcatcaaatacctagattcttttcttctttccactttacgatctatagtaaaacttcatcttcaagctgatagcaaatggctgcagcagttcccacaataacattcagtcatcacagtgttcagaggaacaggagaggcttaggaacaaatggacatctcacagaccagaatttggtaccatgtccatttctttttctgtccttttttttttttttttttttttgagacagggtctcacactgttgcccaggctggagtgtgtagtggtgcaatcttggctcactgcaacctccgcctcccgggttcaagcaatactcctgcctcagcctcccgagtagctgggactacaggtacacgccaccacacccagctaatttttgtattttagtagagacgggatttcaccatgttggccaggatggtctcgaacttctgacctcaggtaatctacccaccttggcctcccaaagcgctgagagtacaggtacccagccccatgtccatttctaagccagtctctggcaaagggactgggattcccaggattgtcttagattaatcatctggggtggaaggtttagcctggaggttaaccacaatgacccttgtgttccccagtccaaaacctgtccattatactccatttccagtgctgccaccttgtccttaccctcatgcccttatattctagtggtgtatatgtatatgtaagtaccatgaagaagataacatggggaaatgaaatagagagtgacacagaggtgggtagttggtgacaggaaatctggaatctcttgatgaggcaacatttgagcttagacctgagtgatgatgagaagaagccaatcatgcatatacataaagcgaaagtcctcgaggcaagctagaaggctgaggaaggagagtttgagcttatagtgtgccaagatcatacctgtgaatagccacggcaccagctgagcaacacagtgaaactctcttaaaaaaaattaaattaaattaactatgttttctaaagtcctgacacagaggaaacagcagatgaaaaagtcctgaagtgggaatatctttgatgtgtttattgtctgtctcttccatgaagtaaaagctctatgaatacaggtaccttgcctgtcttgctcacctgtaagttcctaaggtcctgtctggcacagtggaaagatggaaagagtgcctgggatattttaggtgtgctgtaaatatttattgaatgaataaatgagtctcccacaagcagaacagattgttccttcttaagagttcccatagtactttatattataccttaatttggacacctgcacattgcatggtttgtatacgtctctgccttcctctgctgtgagctccttaagaacagacgggggcccacacataatgcatctttgttttcccattatcaacacaatattaatctcattgtaatctctctggtgagtgagagttgaacattcagtgtacatattaaaaggaactttctgtgaaaatatacttgagtatgtagtatgtttttcaatgtcttttttttttaacctaagaattcacagcaatctagaacttccaggaaaaaattattaaggaaaattagtggtctgtagaaaagagtttgccagctgggcgcggtggctcacgcctgtaatcccatcactttgggaggctgaggtgggcagatcacgaggtcaggagatcgacaccatcctggctaacacagtgaaaccccgtctctactaaaaaatacaaaaaattagccaggcgtggtggcgggcgcctgtagtcccagctactcgggaggctgaggcagcagaatggtgtgaacccaggaggcagagcttgcagtgagccaagatcgcaccactgtactccagcctgggcgacagggtgagactctgtctcaaaaaaaaaaaaaaaaagaaaagaaaagaaaaaagagtttgccattgccttatatggcttaagttcttatcttatacagttgtgttacatagtgttacatacctaagccaaattcttaagggaccaacagttgtgatcataagaatgtcacttatcaggggccagtgcagtggctcacacctgtaatcctacctagcaagttgggaggccaaggaaggaggatcactcgaggccaggagttcaagatcagcctgggcaacacagtaagaccctgtctccacaagaaatttaaaaattagccaaacacagtggcatatatgcctgtagtcccagctacctgggaggctgaggcgggagcagcttgagcccagaaattcaaggttacagtgagctatgatcatgctactgcactccagcctgggcaacaaagtgaaacctgtctcttagaaaaagaatattgcttatctagagacaacattctttttgtttgtttgtttgtttgtttttgagatgaggtctcactctgttgcccaagctggagtgcagtggcatgatcgtctgctttttcatctgctatttcctctgcaccaggacattacaccaaggttacatctctaaatatgcttcataatgcaaactgtatgtctgttggaattgcatatgtgcaattgcagtcctaatacaattacacttatgaaatggatacctgatccaaaattaacaccattactgtttctatatctattaataataccaaaccagtattcgtaaatgaaataatattgtttacttaataaaaatgtaaagaacattagctatttgctagtgtcaaaaagaagtgtggcagttgtaattgtgccctgtccctttaatggaaaaagccaaataattttaaaatgaaagcctttcaccatcaatgccagcagacttatataaatgttgttttcataaaataaaaataaataaaaaatgctcattaacagcatgagacggtgagtagaacaaagcagctactgagtgtattactccacacattcatcataacaacacaagagttctgtgttaggggtgtattaacattgcttttaaactttagtgaggctggctgggtgctgtggctcacacctgtaatcccagcactttgggaagctgaggcaggtggatcacctgaggtcaggagtttaagaccagcctggccaatatggtgaaaccttgtctctactaaaaatacaaaaaaattagctgggcatggtgacgtgcccctgtagtcccagctacttgggaggctgaggcaggagaattgcttgaacccaggaggtggagttgtagcgagctgagatcggaccactgcactccagcctgggtgacggagttagagtctgtctcaaaaaaaaaaaaaaagccgggcgcggtggctcacacctgtaatcccagcattttggaaggccaaggcgggtggatcacgaggtcaggagatcgagaccatcctggctaacatggtgaaactccgtctctactaaaaatacgaaaaaaattagccaggcgtggtggcggcgcccgtagtcccagctactcgggaggctgaggtaggagaatggcgtgaacccgggaggtggagcttgcagtgagctgagatcatgccactgcactccagcctgggtggcagagtgagactccatctcaaaaaaaaaaaaaaaaaaaaaagaaaattaaactttagtgaggtatctgggggaacataagcttatagaacctagataatccattcctagatggattatatttgtagttatgcagtccagagttcatatcttgtcaaatcatgtagccttgggagtgttacatcagttctctaagcctgtttgctcacctgaaaatgaagctagtaattcctgccctgtgtggtcattatgagcacgaaatgaaataacacgtgtatatagcattagcatatagcatttctgtgtaataaagcaaaatagtccatagtttggtggcatgcttttttcacttagccgtctatcacaaacattttccatattgatagatctgtatcagcatcattttaatggctatctgatgctaatttcgagctaatatgtactataattcaccctggagcagcctctggcagagtgactatagcataggcatttctgtaggaccatgctgtttcctgttgactgcgctcctcacttccctggtgcttctgattcttctaggtgttaacggtttgaggatgctggggattctccatgatgcagttgtgttcctcattgagcagctgtctggtgccaagcactgtcgaaattacaaattccgtttccacaagccagaggaggccaatgaaccccccttgaaccctcacggctcagccagggctgaagtccacctcaggcaagttcccttcttttctgtcagcagttttgggtctcgattttcttatctcatgacactgtcatcttcccacataccctttgagatttccagttttaatgccatcatcctttactgctttattaaagcatttctctaaatatgttttaatcttttggccccaggaagtcagcatttgacatgtttaacttcctggcttctaaacatcgtcagcctcctgaatacaaccccaatgatgaagaagaggaggaggtacagctgaagtcagctcggtaagtcttgagtggggagcagtcattagaaactgctttccctctcctccagctggtcagggcactacgtaggaatttgtttgcatcagaatttcctggataagatttaaaaggactgaaaaccatttgtgttgaagtagcagtaggtgcctggtaaggagtgaggaatataaggtacagaggagaaattcaaagaactgtaagatgcctgttttctttaatgatagtatactctgtcagctttggttgtaccaccatagttgtcatggtcagaaagtactatatatactaaaaatgggactcattggccaggcacagtggctcatgcctgtaattccagcactttggaagtccgaggcggacagatcatgaggtcaggagttcgagaccagcctgaccaacatagtgaaaccctatctctactaaaaatacaaaaattagcccggcgtggtggcgcgcgcctgtagtcccacctactcagcaggctgaggcaagagaatcgcttgaacccaggaggcggaggttacagtgagccgagatcgcaccactggactccagcctgggcgacagagcgaaactccatctcaaaaaaaaaaggggggcgctcattttataaggcactcgttcagtttggcattaaacaaagagtgtactaattgtctctaggaaccttcgattcaagactcaaaacattatttcctgaaaaaaattcgttaatagtatgtcttatctcttaggagggcaactagcatggatctgccaatgcccatgcgcttccggcacttaaaaaagacttctaaggaggcagttggtgtctacaggtatgactaaaattctagaaagaattacagaaaacgaatgcagtttttcaaaatcaaagcagaccaaatgctggagtgaccttcctcactcagtaagtgaggattttacggacactatttattgaccctcatatcctgggatcctgcacctccttgtgttgaacaaggactttaacataataagcattaaaatattactgcttccagcgggtcacagaatggaaataactttcatctttggccatgtgttagatggccaaatcaagtgggtccaaatttttattttctcaagtatatgtccctcctggggaactaacagaccaggagaacttattcatgtattcacgcacttaaccttacttgcaaaatttgtgtctgacctcttttccatctttgtcctaggtctcccatccatggccggggtcttttctgtaagagaaacattgatgcaggtgagatggtgattgagtatgccggcaacgtcatccgctccatccagactgacaagcgggaaaagtattacgacagcaaggtaagtctcccacttgcactcacacagttcttttgttttgctgtagaaagggaccagtatgacccctggatcacaaaagaaatagtgtatgttatcaattcagagacctttcttaaaaaaataaactctgaaatttgtgaggggcccagtaaaaatacagaatccactctgaggattagtacagaaagttgctcttagaaggtttgtctgagtggctcctagtatcagaagcaaatagctatacaagttttaggtttctctctcctgcagagacattagaaacctctagactagtggcctgtaatctaggaaatcctcgtggaagcatcttgaaagatagtactgggagaaatctggaaattttactagaagaaactttctcagccgctataggtaacatcaagagaagattgggacatgttcttaaagctgagtttataagaaatgacaagttcttctcccttcttctgcatgtgcagggcattggttgctatatgttccgaattgatgactcagaggtagtggatgccaccatgcatggaaatgctgcacgcttcatcaatcactcgtgtgagcctaactgctattctcgggtcatcaatattgatgggcagaagcacattgtcatctttgccatgcgtaagatctaccgaggagaggaactcacttacgactataagttccccattgaggatgccagcaacaagctgccctgcaactgtggcgccaagaaatgccggaagttcctaaactaaagctgctcttctcccccagtgttggagtgcaaggaggcggggccatccaaagcaacgctgaaggccttttccagcagctgggagctcccggattgcgtggcacagctgaggggcctctgtgatggctgagctctcttatgtcctatactcacatcagacatgtgatcatagtcccagagacagagttgaggtctcgaagaaaagatccatgatcggctttctcctggggcccctccaattgtttactgttagaaagtgggaatggggtccctagcagacttgcctggaaggagcctattatagagggttggttatgttgggagattgggcctgaatttctccacagaaataagttgccatcctcaggttggccctttcccaagcactgtaagtgagtgggtcaggcaaagccccaaatggagggttggttagattcctgacagtttgccagccaggccccacctacagcgtctgtcgaacaaacagaggtctggtggttttccctactatcctcccactcgagagttcacttctggttgggagacaggattcctagcacctccggtgtcaaaaggctgtcatggggttgtgccaattaattaccaaacattgagcctgcaggctttgagtgggagtgttgcccccaggagccttatctcagccaattacctttcttgacagtaggagcggcttccctctcccattccctcttcactcccttttcttcctttcccctgtcttcatgccactgctttcccatgcttctttcgggttgtaggggagactgactgcctgctcaaggacactccctgctgggcataggatgtgcctgcaaaaagttccctgagcctgtaagcactccaggtggggaagtggacaggagccattggtcataaccagacagaatttggaaacattttcataaagctccatggagagttttaaagaaacatatgtagcatgattttgtaggagaggaaaaagattatttaaataggatttaaatcatgcaacaacgagagtatcacagccaggatgacccttgggtcccattcctaagacatggttactttattttccccttgttaagacataggaagacttaatttttaaacggtcagtgtccagttgaaggcagaacactaatcagatttcaaggcccacaacttggggactagaccaccttatgttgagggaactctgccacctgcgtgcaacccacagctaaagtaaattcaatgacactactgccctgattactccttaggatgtggtcaaaacagcatcaaatgtttcttctcttcctttccccaagacagagtcctgaacctgttaaattaagtcattggattttactctgttctgtttacagtttactatttaaggttttataaatgtaaatatattttgtatatttttctatgagaagcacttcatagggagaagcacttatgacaaggctattttttaaaccgcggtattatcctaatttaaaagaagatcggtttttaataattttttattttcataggatgaagttagagaaaatattcagctgtacacacaaagtctggtttttcctgcccaacttccccctggaaggtgtactttttgttgtttaatgtgtagcttgtttgtgccctgttgacataaatgtttcctgggtttgctctttgacaataaatggagaaggaaggtcacccaactccattgggccactcccctccttcccctattgaagctcctcaaaaggctacagtaatatcttgatacaacagattctcttctttcccgcctctctcctttccggcgcaacttccagagtggtgggagacggcaatctttacatttccctcatctttcttacttcagagttagcaaacaacaagttgaatggcaacttgacatttttgcatcaccatctgcctcataggccactctttcctttccctctgcccaccaagtcctcatatctgcagagaacccattgatcaccttgtgccctcttttggggcagcctgttgaaactgaagcacagtctgaccactcacgataaagcagatttttctctgcctctgccacaaggtttcagagtagtgtagtccaagtagagggtggggcacccttttctcgccgcaagaagcccattcctatggaagtctagcaaagcaatacgactcagcccagcactctctgccccaggactcatggctctgctgtgccttccatcctgggctcccttctctcctgtgaccttaagaactttgtctggtggctttgctggaacattgtcactgttttcactgtcatgcagggagcccagcactgtggccaggatggcagagacttccttgtcatcatggagaagtgccagcaggggactgggaaaagcactctacccagacctcacctcccttcctccttttgcccatgaacaagatgcagtggccctaggggttccactagtgtctgctttcctttattattgcactgtgtgaggtttttttgtaaatccttgtattcctattttttttaaagaaaaaaaaaaaaccttaagctgcatttgttactgaaatgattaatgcactgatgggtcctgaattcaccttgagaaagacccaaaggccagtcagggggtggggggaactcagctaaatagacctagttactgccctgctaggccatgctgtactgtgagcccctcctcactctctaccaaccctaaaccctgaggacaggggaggaacccacagcttccttctcctgccagctgcagatggtttgccttgcctttccaccccctaattgtcaaccacaaaaatgagaaattcctcttctagctcagccttgagtccattgccaaattttcagcacacctgccagcaacttgggggaataagcgaaggtttccctacaagagggaaagaaggcaaaaacggcacagctatctccaaacacatctgagttcatttcaaaagtgaccaagggaatctccgcacaaaagtgcagattgaggaattgtgatgggtcattcccaagaatcccccaaggggcatcccaaatccctgaggagtaacagctgcaaacctggtcagttctcagtgagagccagctcacttatagctttgctgctagaacctgttgtggctgcatttcctggtggccagtgacaactgtgtaaccagaatagctgcatggcgctgaccctttggccggaacttggtctcttggctccctccttggccacccaccacctctcgcacagcccctctgtttttacaccaataacaagaattaagggggaagccctggcagctatacgttttcaaccagactcctttgccgggacccagcccgccaccctgctcgcctccgtcaaacccccggccaatgcagtgagcaccatgtagctcccttgatttaaaaaaaataaaaaataaaaaaaaaaggaaaaaaaaatacaacacacacacaaaaataaaaaaaatattctaatgaatgtatctttctaaaggactgacgttcaatcaaatatctgaaaatactaaaggtcaaaaccttgtcagatgttaacttctaagttcggtttgggattttttttttttaatagaaatcaagttgtttttgtttttaaggaaaagcgggtcattgcaaagggctgggtgtaattttatgtttcatttccttcattttaaagcaatacaaggttatggagcagatggttttgtgccgaatcatgaatactagtcaagtcacacactctggaaacttgcaactttttgtttgttttggttttcaaataaatataaatatgatatatataggaactaatatagtaatgcaccatgtaacaaagcctagttcagtccatggcttttaattctcttaacactatagataaggattgtgttacagttgctagtagcggcaggaagatgtcaggctcactttcctctgattcccgaaatggggggaacctctaaccataaaggaatggtagaacagtccattcctcggatcagagaaaaatgcagacatggtgtcacctggatttttttctgcccatgaatgttgccagtcagtacctgtcctccttgtttctctatttttggttatgaatgttggggttaccacctgcatttaggggaaaattgtgttctgtgctttcctggtatcttgttccgaggtactctagttctgtctttcaaccaagaaaatagaattgtggtgtttcttttattgaacttttaacagtctctttagtaaatacaggtagttgaataattgtttcaagagctcaacagatgacaagcttcttttctagaaataagacattttttgacaactttatcatgtataacagatctgttttttttccttgtgttcttccaagcttctggttagagaaaaagagaaaaaaaaaaaaggaaaatgtgtctaaagtccatcagtgttaactccctgtgacagggatgaaggaaaatactttaatagttcaaaaaataataatgctgaaagctctctacgaaagactgaatgtaaaagtaaaaagtgtacatagttgtaaaaaaaaggagtttttaaacatgtttattttctatgcacttttttttatttaagtgatagtttaattaataaacatgtcaagttta
